(19) United States
(12) Patent Application Publication
(10) Pub. No.: US 2026/0022357 A1
(43) Pub. Date: Jan. 22, 2026

(54) RECOMBINANT PROTEINS FOR GENE DELIVERY AND INSERTION

(71) Applicant: Averna Therapeutics Ltd, Ness Ziona (IL)

(72) Inventors: Yaron BEN SHUSHAN-GOLECZKI, Tel Aviv-Jaffa (IL); Noga KOWALSMAN, Nessa Ziona (IL); Devin TRUDEAU, Rehovot (IL)

(21) Appl. No.: 19/224,551

(22) Filed: May 30, 2025

Related U.S. Application Data
(63) Continuation of application No. PCT/IB2023/062154, filed on Dec. 2, 2023.
(60) Provisional application No. 63/429,955, filed on Dec. 2, 2022.

(51) Int. Cl. C12N 9/22; A61K 38/00; C07K 14/195; C07K 14/47; C12N 9/12; C12N 15/85; C12N 15/88

(52) U.S. Cl. CPC C12N 9/22; C07K 14/195; C07K 14/4702; C12N 9/1252; C12N 9/1276; C12N 15/85; C12N 15/88; A61K 38/00; C07K 2319/80; C12N 2800/22; C12Y 207/07007; C12Y 207/07049; C12Y 207/13003; C12Y 301/26004

(57) ABSTRACT

The present disclosure provides compositions and methods for delivering a gene of interest to a subject. Aspects of the application relate to nucleic acids encoding modified retroelement-derived polypeptides and gene delivery constructs that can direct integration of a nucleic acid sequence into a target nucleic acid (e.g., a genome of a subject).

### CROSS-REFERENCE TO RELATED APPLICATION

[0001] This application is a continuation application of International Application No. PCT/IB2023/062154 filed Dec. 2, 2023, which claims priority to U.S. Provisional Application No. 63/429,955, filed on Dec. 2, 2022. This application is hereby incorporated by reference in their entirety.

### REFERENCE TO AN ELECTRONIC SEQUENCE LISTING

[0002] The contents of the electronic sequence listing (AVRT_001_01 US_SeqList_ST26.xml; Size: 828,842 bytes; and Date of Creation: May 29, 2025) are herein incorporated by reference in its entirety.

### BACKGROUND OF INVENTION

[0003] Gene therapy can be used to treat diseases or conditions associated with genetic defects by delivering one or more therapeutic genes or cells with corrected defects to a subject. For example, therapeutic genes can be delivered in vectors that promote integration into the host genome of a subject.

[0004] Despite recent activity in the field of retrotransposon delivery and genome insertion, there remains a need for nucleic acids and proteins to carry out these methods with improved, inter alia, efficiency, specificity, accuracy, fidelity and processivity of integration. Provided herein are methods and compositions that address the same.

### SUMMARY OF THE INVENTION

[0005] In one aspect, provided herein is a nucleic acid encoding an engineered protein comprising a retroelement-derived polypeptide and at least one heterologous polypeptide; wherein the retroelement-derived polypeptide is derived from a non-long terminal repeat (non-LTR) retrotransposon; wherein the at least one heterologous polypeptide comprises an RNA/DNA processing polypeptide or domain thereof, an RNA/DNA repair polypeptide or domain thereof, a nucleic acid binding polypeptide or domain thereof, or a nucleosome binding polypeptide or domain thereof; and wherein the engineered protein exhibits at least one improved integration characteristic, as compared to a retroelement-derived polypeptide not fused to the at least one heterologous polypeptide.

[0006] In another aspect, provided herein is a nucleic acid encoding an engineered protein comprising a retroelement-derived polypeptide variant having at least one amino acid modification when compared to a naturally occurring retroelement-derived polypeptide; wherein the retroelement-derived polypeptide variant is derived of a non-long terminal repeat (non-LTR) retrotransposon; and wherein the retroelement-derived polypeptide variant exhibits at least one improved integration characteristic, as compared to the naturally occurring retroelement-derived polypeptide without the at least one amino acid modification.

[0007] In another aspect provided herein is a nucleic acid encoding a retroelement-derived reverse transcriptase domain having at least one amino acid modification that stabilizes the reverse transcriptase domain and/or stabilizes its association with RNA and/or DNA relative to an unsubstituted reverse transcriptase domain, wherein the reverse transcriptase domain is an amino acid variant of a reverse transcriptase domain of a non-LTR retrotransposon.

[0008] In another aspect provided herein is a nucleic acid encoding a retroelement-derived endonuclease domain comprising at least one amino acid modification that promotes association of the retroelement-derived endonuclease domain with DNA relative to an unmodified endonuclease domain.

[0009] In another aspect provided herein are methods of modifying polynucleotides, e.g. in a cell or a subject, comprising using any one or more of the nucleic acids encoding the engineered proteins described herein.

### BRIEF DESCRIPTION OF DRAWINGS

[0010] The figures and figure descriptions provided herein are intended to illustrate embodiments by way of example only.

[0011] FIGS. 1A-1E illustrate non-limiting examples of gene delivery constructs that are useful for promoting insertion of a transgene (e.g., a heterologous nucleic acid comprising a gene of interest) into a target nucleic acid. FIG. 1A illustrates a non-limiting example of a gene delivery construct comprising a transgene (a “gene of interest”) flanked by two terminal regions that can interact with a retroelement-derived polypeptide and promote integration of the transgene into a target nucleic acid. FIG. 1B illustrates a non-limiting example of two separate nucleic acid molecules, wherein the first nucleic acid is a gene delivery construct comprising a gene of interest flanked by two terminal regions (as shown in FIG. 1A), and the second nucleic acid is a driver construct encoding a driver comprising an engineered protein (e.g., comprising a retroelement-derived polypeptide) are in trans configuration. FIG. 1C illustrates a non-limiting example of a single nucleic acid comprising both a gene of interest ad a sequence encoding an engineered protein (e.g., comprising a retroelement-derived polypeptide) flanked by two terminal regions, with the gene of interest and the sequence encoding an engineered protein being in a cis configuration (i.e., in the same nucleic acid). FIG. 1D illustrates a non-limiting example of gene integration into a target nucleic acid (e.g., genomic DNA) promoted by two separate nucleic acid molecules (a gene delivery construct a gene of interest flanked by two terminal regions, and a driver construct comprising a coding sequence for an engineered retroelement-derived polypeptide) in a trans configuration. FIG. 1E illustrates a non-limiting example of gene integration into a target nucleic acid (e.g., genomic DNA) promoted by a single nucleic acid comprising both a gene of interest and an engineered protein coding sequence flanked by two terminal regions.

[0012] FIGS. 2A-2L illustrate non-limiting examples of different configurations of an engineered protein comprising a retroelement-derived polypeptide fused to one or more heterologous polypeptides that can promote integration of a transgene into a target nucleic acid.

[0013] FIG. 2A illustrates a non-limiting example of an engineered protein comprising a retroelement-derived polypeptide fused to a heterologous polypeptide at its N-terminus. FIG. 2B illustrates a non-limiting example of an engineered protein comprising a retroelement-derived polypeptide fused to a heterologous polypeptide at its C-terminus. FIG. 2C illustrates a non-limiting example of an engineered protein comprising a retroelement-derived polypeptide that has a first heterologous polypeptide fused to its N-terminus and a second heterologous polypeptide fused to its C-terminus. FIG. 2D illustrates a non-limiting example of a heterologous polypeptide comprising a first domain and a second domain fused to the N-terminus of a retroelement-derived polypeptide. FIG. 2E illustrates a non-limiting example of a heterologous polypeptide comprising an optional linker, a domain, and an optional nuclear localization sequence (NLS) fused to the N-terminus of a retroelement-derived polypeptide. FIG. 2F illustrates a non-limiting example of a heterologous polypeptide comprising an optional linker, a domain, and an optional NLS fused to the C-terminus of a retroelement-derived polypeptide. FIG. 2G illustrates a non-limiting example of a first heterologous polypeptide comprising a first optional linker, a first domain, and a first optional NLS at the N-terminus of a retroelement-derived polypeptide, and a second heterologous polypeptide comprising a second optional linker, a second domain, and a second optional NLS at the C-terminus of the retroelement-derived polypeptide. FIG. 2H illustrates a non-limiting example of a heterologous polypeptide comprising an optional NLS, a first domain, a first optional linker, a second domain, and a second optional linker fused to the N-terminus of a retroelement-derived polypeptide. FIG. 2I illustrates a non-limiting example of a heterologous polypeptide comprising a first optional linker, a first domain, a second optional linker, a second domain, and an optional NLS fused to the C-terminus of a retroelement-derived polypeptide. FIG. 2J illustrates a non-limiting example of a first heterologous polypeptide comprising an optional NLS, a first domain, a first optional linker, a second domain, and a second optional linker fused to the N-terminus of a retroelement-derived polypeptide, and a second heterologous polypeptide comprising a third optional linker, a third domain, a fourth optional linker, a fourth domain, and a second optional NLS fused to the C-terminus of the retroelement-derived polypeptide. FIG. 2K illustrates a non-limiting example of a first heterologous polypeptide comprising an optional NLS, a first domain, a first optional linker, a second domain, and a second optional linker fused to the N-terminus of a retroelement-derived polypeptide, and a second heterologous polypeptide comprising a third optional linker, a third domain, and a second optional NLS fused to the C-terminus of the retroelement-derived polypeptide. FIG. 2L illustrates a non-limiting example of a first heterologous polypeptide comprising an optional NLS, a first domain, and a first optional linker fused to the N-terminus of a retroelement-derived polypeptide, and a second heterologous polypeptide comprising a second optional linker, a second domain, a third optional linker, a third domain, and a second optional NLS fused to the C-terminus of the retroelement-derived polypeptide.

[0014] FIG. 3 illustrates the results of integration assays using retroelement-derived polypeptides comprising HDR and chromatin opening domains along with p53 inhibition.

[0015] FIGS. 4A-4B illustrate the results of integration assays using retroelement-derived polypeptides comprising point mutations.

[0016] FIG. 5 illustrates the results of integration assays using drivers with combinations of domain fusions and point mutations. The different retrotransposable element (driver) constructs were used in the trans configuration (driver and GFP reporter encoded by different RNA). A common gene delivery construct encoding the GFP reporter (EX2107; SEQ ID NO: 319) was used for all driver constructs tested.

[0017] FIGS. 6A-6I show integration assays results using Vingi-1_Acar drivers with combinations of domain fusions and point mutations. In these experiment, different retrotransposable element (driver) constructs were used in the trans configuration (driver and GFP reporter encoded by different RNA). A common gene delivery construct encoding the GFP reporter (EX2988; SEQ ID NO: 328) was used for all driver constructs tested. Aside from the mutations and fusions listed, all constructs were identical in sequence to EX2985 (WT, marked with pattern).

[0018] FIG. 7A shows results of integration assays using Vingi-1 drivers with point mutations. In this experiment, different retrotransposable element (driver) constructs were used in the trans configuration (driver and GFP reporter encoded by different RNA). A common gene delivery construct encoding the GFP reporter (EX2988; SEQ ID NO: 328) was used for all driver constructs tested. The following mutations in Vingi-1 were tested in this experiment: Q634L (SEQ ID NO: 71), F238Y+M16I (SEQ ID NO:376), I45L (SEQ ID NO: 77), G833I (SEQ ID NO: 84), K703R (SEQ ID NO: 119), K480Q (SEQ ID NO: 120), K675R (SEQ ID NO: 121), P808K (SEQ ID NO: 125), M570L (SEQ ID NO: 151), L590F (SEQ ID NO: 153), M735E (SEQ ID NO: 156), K966R (SEQ ID NO: 168), A901H (SEQ ID NO: 83), L493R (SEQ ID NO: 102). The wild-type Vingi-1_Acar driver is shown in grey (SEQ ID NO:327).

[0019] FIG. 7B shows results of integration assays using Vingi-1 drivers with point mutations. In this experiment, different retrotransposable element (driver) constructs were used in the trans configuration (driver and GFP reporter encoded by different RNA). A common gene delivery construct encoding the GFP reporter (EX2988; SEQ ID NO: 328) was used for all driver constructs tested. The following mutations in Vingi-1 were tested in this experiment: D191A (SEQ ID NO: 174), A684S (SEQ ID NO: 72), Y313F (SEQ ID NO: 93), Q215D (SEQ ID NO: 96), K966R (SEQ ID NO: 168), K675R (SEQ ID NO: 121), G116N (SEQ ID NO: 111), N695R (SEQ ID NO: 178), R696H (SEQ ID NO: 179), S754T (SEQ ID NO: 243), P808T (SEQ ID NO: 185), N-terminal fusion of PaRecT (SEQ ID NO: 275), Codon-optimized Vingi-1 driver mRNA (SEQ ID NO: 397).

### DETAILED DESCRIPTION OF INVENTION

[0020] In some aspects, the application relates to engineered retroelement-derived polypeptides, nucleic acids (e.g., RNA and/or DNA) encoding the engineered retroelement-derived polypeptides, and their use to promote integration of a transgene (e.g., a heterologous nucleic acid encoding a gene of interest) into a target nucleic acid.

### Definitions

[0021] The term “about,” as used herein, is intended to qualify the numerical values which it modifies, denoting such a value as variable within a margin of ±10%.

[0022] The terms “protein”, “peptide” and “polypeptide” may be used interchangeably herein and refer to a polymer of amino acid residues linked together by peptide bonds, which may be canonical amide bonds or other types of bonds linking amino acids. Typically, a protein, peptide or polypeptide will be at least three amino acids long, however, any size is contemplated. In some embodiments, a protein, peptide or polypeptide may have at least one domain, which is a structure defined by a portion or portions of the amino acid sequence, which provides a functional property. In some embodiments, the domain can fold independently to produce the functional structure. The function property may be an enzymatic “activity” (nuclease activity, DNA transcriptase activity, integrase activity). For example, an amino acid sequence of a natural or synthetic polypeptide or protein having a reverse transcriptase (RT) activity comprises an RT domain. In some embodiments, the domain may be a motif, which confers a given characteristic or property that is not an enzymatic activity, such as stabilization, binding specificity, interaction specificity, or recruiting specificity. A protein, peptide or polypeptide may comprise several different domains.

[0023] A protein, peptide or polypeptide may be natural or synthetic and may optionally include one or more mutations or modifications (e.g. amino acid substitutions, amino acid deletions, amino acid additions, or amino acid truncations) thereby generating a “variant”, i.e., a variant protein, variant peptide, or variant polypeptide that has a different amino acid sequence compared to the naturally occurring protein, peptide or polypeptide. In non-limiting examples, an amino acid mutation, is an amino acid substitution that improves packing of hydrophobic residues in the core of the active domain, stabilizes a loop region, and/or alters electrostatic charge, H-bond stability, or S-bond stability. In other non-limiting examples, the substitution and/or addition that stabilizes a loop region is a proline substitution. Without wishing to be bound to theory, certain substitutions may alter an electrostatic charge, for example an amino acid having a positive charge may increase affinity towards DNA or RNA or to increase specificity by altering the H-bond network with a polar substitution. Hydrophobic mutations may increase secondary and tertiary structure and helical propensity and size mutations can lead to improved stability. For example, by mutation to lysine or arginine, or mutation from aspartate or glutamate to a non-charged residue such as alanine. A “variant” polypeptide may have from about 70%, to about 99%, or 80%, 85%, 90%, 95%, 96%, 97%, 98%, or 99% identity to the wild-type or reference polypeptide and having the same or substantially the same function as the wild-type or reference polypeptide. The percent identity between two such polypeptides can be determined by manual inspection of the two optimally aligned polypeptide sequences or by using software programs or algorithms (e.g., CLUSTAL, MUSCLE, MAFFT) using standard parameters, familiar to one with skill in the art.

[0024] A “fusion” protein, polypeptide, or peptide refers to a protein, polypeptide, or peptide that has been modified by adding (fusing) at least one polypeptide, which may be a domain, from a different (i.e., heterologous) protein, polypeptide, or peptide. The heterologous polypeptide may be located at the amino-terminal (N-terminal) portion of the fusion protein thus forming an “amino-terminal” (or “N-terminus”) fusion protein. Alternatively, the heterologous polypeptide may be located at the carboxy-terminal (C-terminal) protein thus forming a “carboxy-terminal” (or “C-terminus”) fusion protein. As described herein, a heterologous polypeptide may be fused at the N-terminus, C-terminus, or internally.

[0025] An “engineered” protein, peptide or polypeptide refers to a protein, peptide or polypeptide that comprises (1) at least one amino acid modification to create a variant and/or (2) at least one domain from a heterologous polypeptide, which may be a domain. An engineered protein, peptide or polypeptide may comprise a plurality (e.g., 2, 3, 4, 5, 6, 7, or more) of heterologous domains and/or a plurality (e.g., 2, 3, 4, 5, 6, 7, or more) of amino acid modifications.

[0026] In some embodiments, an engineered protein, peptide or polypeptide described herein is encoded by a nucleic acid (e.g., an RNA molecule or a DNA molecule). The nucleic acids and polypeptides disclosed herein may be produced by methods known in the art. For example, the nucleic acids disclosed herein may be prepared synthetically or via in-vitro transcription (IVT) methods known in the art. Likewise, the polypeptides described herein may be produced via recombinant protein expression and purification, which is well suited for fusion proteins.

[0027] Methods for recombinant protein expression and purification are well known, and include those described by Green and Sambrook, Molecular Cloning: A Laboratory Manual (4^{th} ed., Cold Spring Harbor Laboratory Press, Cold Spring Harbor, N.Y. (2012)), the entire contents of which are incorporated herein by reference.

[0028] The terms “polynucleotide,” “nucleic acid” and “NA” may be used interchangeably and refer to a polymer of nucleotides. In some embodiments, the polynucleotide comprises one or more chemical and/or sequence modifications. The polymer may include natural nucleosides (i.e., adenosine, thymidine, guanosine, cytidine, uridine, deoxyadenosine, deoxythymidine, deoxyguanosine and deoxycytidine), and nucleoside analogs having modified bases, modified sugars (e.g., 2′-fluororibose, 2′-methoxy), or modified phosphate groups (e.g., phosphorothioates, 2′-5′ linkage). In some embodiments, a nucleic acid comprises one or more chemical and/or sequence modifications. In some embodiments, the modification is an RNA CAP, a modified polyA length (e.g., relative to a natural polyA), a chemically modified nucleotide, a 5′ UTR (untranslated region) modification, a 3′ UTR modification, a modified Sirloin (SINE-derived nuclear RNA localization, Lubelsky, 2018) sequence, a modified (e.g., truncated) stem loop, an RNA stabilization motif, a 5-methoxyuridine (5-MO-U) modification, a 5-methylcytidine (5mC) modification, or one or more additional and/or modified microsatellites. In some embodiments, a nucleic acid encoding an engineered protein and/or other gene (e.g., a therapeutic RNA or protein) is codon optimized (e.g., codon optimized for expression in human cells). In some embodiments, codon optimization is implemented for RNA optimization. In some embodiments, RNA optimization comprises one or more of the following modifications compared to the wild-type RNA molecule: In some embodiments, RNA optimization comprises reducing the uracil (U) load of an RNA molecule. In some embodiments, RNA optimization comprises reducing the GC % content of an RNA molecule. In some embodiments, RNA optimization comprises reducing the length and/or number of intron sequences of an RNA molecule. In some embodiments, RNA optimization comprises reducing RNA binding motifs or sites within an RNA molecule. In some embodiments, RNA optimization comprises lowering AG (free energy) of an RNA molecule. In some embodiments, RNA optimization comprises reducing the nucleotide repeats found in a sequence of an RNA molecule. In some embodiments, RNA optimization comprises increased human or tissue tRNA frequency usage (AKA codon-usage) of an RNA molecule. In some embodiments, RNA optimization comprises reducing the number of palindromic sequences in an RNA molecule. In some embodiments, RNA optimization comprises maximizing pairing of bases of an in an RNA molecule. In some embodiments, RNA optimization comprises removing splicing site sequences from an RNA molecule. In some embodiments, RNA optimization comprises removing rare codons or other slowly translated codons. A person with skill in the art will be able to generate a polynucleotide encoding any one of the polypeptides disclosed herein, based on the polypeptide sequence, as provided herein.

[0029] In some embodiments, a nucleic acid encoding an engineered enzyme (e.g. a driver) and/or a gene delivery construct comprises a promoter. In some embodiments, the promoter is a naturally occurring promoter. In some embodiments, the promoter is a recombinant promoter. In some embodiments, the promoter is a constitutive, inducible, and/or tissue or cell specific promoter.

[0030] A “nuclear localization sequence” or “NLS” refers to an amino acid sequence that promotes import of a non-nuclear polypeptide into the cell nucleus. Nuclear localization sequences and methods for assessing an NLS peptide's ability to direct a polypeptide to the nucleus are known to those with skill in the art, and examples are provided herein.

[0031] In some embodiments, two molecules or components (i.e., nucleic acid to nucleic acid, polypeptide to polypeptide, etc.) may be linked together via a linker. The linker can be an amino acid sequence (about 2 to about 100 amino acids or about 2 to about 50 amino acids) in the case of a linker joining two polypeptides. For example, a retroelement-derived polypeptide may be fused to a heterologous polypeptide by an amino acid linker known to those with skill in the art, and examples are provided herein.

[0032] The terms “retrotransposon”, “retrotransposable element”, “RTE” or “retroelement” may be used interchangeably herein. Without wishing to be bound to theory, retrotransposons are genetic elements that are ubiquitous components of the genomic DNA of many vertebrate and non-vertebrate organisms and can amplify themselves via an RNA intermediate.

[0033] The term “retroelement-derived polypeptide” refers to a polypeptide that is based on one or more naturally occurring proteins encoded by a naturally occurring retroelement or a portion thereof. In some embodiments, retroelement-derived polypeptide may comprise one or more amino acid modifications (e.g. amino acid substitutions, amino acid deletions, amino acid additions, or amino acid truncations) thereby generating a variant that has a different amino acid compared to the one or more naturally occurring proteins.

[0034] A “DNA polymerase” refers to a polymerase that can catalyze synthesis of a nucleic acid strand. The DNA polymerase activity of a DNA polymerase domain in a retroelement-derived polypeptide may be a DNA-dependent DNA polymerase, which may be referred to herein as a “DNA pol” that catalyzes synthesis of a DNA strand based on a DNA template strand. The DNA polymerase may be an RNA-dependent DNA polymerase, which may also be referred to here as a reverse transcriptase or “RT” that catalyzes synthesis of a DNA strand based on an RNA template strand. In some embodiments, retroelement derived polypeptide comprises a DNA pol domain. In some embodiments, the DNA polymerase activity is provided by an RT domain.

[0035] The nuclease activity of a nuclease domain in a retroelement-derived polypeptide may be referred to herein as “cutting” or “cleaving”. Suitable nucleases will be apparent to those of skill in the art based on this disclosure.

[0036] An “Apurinic/apyrimidinic endonuclease” or “APE” refers to polypeptide domain that recognizes and cleaves the sugar-phosphate backbone of DNA at abasic sites when found in the context of duplex DNA. It can recognize and cleave not only true abasic sites but other substrates including tetrayhydrofuran moieties which lack an oxygen atom on the 1′ carbon of the sugar ring.

[0037] An “APE-type retroelement” refers to a non-LTR retroelement that contains an Apurinic/apyrimidinic endonuclease sequence.

[0038] A “gene delivery construct” (or “gene delivery nucleic acid”) comprises a sequence of interest, which may be referred to as a transgene, that encodes a RNA or protein (e.g. a therapeutic RNA or protein). In some embodiments, a gene delivery construct may comprise a plurality of transgenes. The gene delivery construct may further one or more one or more 5′ regulatory nucleic acid sequence elements and/or one or more 3′ nucleic acid sequence elements. In some embodiments, the gene delivery construct does not include any 5′ or 3′ regulatory nucleic acid sequences. In some embodiments the gene delivery construct includes one or more 5′ and/or 3′ regulatory nucleic acid sequences. In some embodiments the regulatory nucleic acid sequences are derived from a non-LTR retroelement. In some embodiments, the gene delivery construct includes a promoter. In some embodiments, the gene delivery construct includes an open reading frame encoding a RNA or protein. In some embodiments, the gene delivery construct includes untranslated regions (UTRs) that stabilize the RNA transcript. In some embodiments, the gene delivery construct includes a polyadenylation signal. In some embodiments, the gene delivery construct includes homology arms that direct integration to one or more genomic sites of interest. In some embodiments, the gene delivery construct has sequence elements that interact with the driver. In such cases, a given gene delivery construct may be referred to by the retroelement from which the retroelement-derived polypeptide comprised in the driver was derived. For example, a gene delivery construct having sequence elements that interact with a driver comprising a retroelement-derived polypeptide derived from the ZFL2-2 retroelement may be referred to herein as a “ZFL2-2 gene delivery construct”. As another example, a gene delivery construct having sequence elements that interact with a driver comprising a retroelement-derived polypeptide derived from the Vingi-1_Acar retroelement may be referred to herein as a “Vingi-1 gene delivery construct”.

[0039] A “driver nucleic acid” (or “driver construct”) encodes a “driver” or “driver polypeptide” which includes an engineered protein comprising a retroelement-derived polypeptide. The driver may be referred to by the retroelement from which the retroelement-derived polypeptide was derived. For example, a driver comprising a retroelement-derived polypeptide derived from the ZFL2-2 retroelement (optionally with heterologous domains and/or optionally with amino acid modifications) may be referred to herein as a ““ZFL2-2 driver”. An another example, a driver comprising a retroelement-derived polypeptide derived from the Vingi-1_Acar retroelement (optionally with heterologous domains and/or optionally with amino acid modifications) may be referred to herein as a ““Vingi-1_Acar driver” or “Vingi-1 driver”).

[0040] The retroelement-derived polypeptide may have endonuclease activity and/or polymerase activity. In some embodiments, the driver has endonuclease activity. In some embodiments, the driver has polymerase activity. In some embodiments, polymerase activity comprises reverse transcriptase activity. In some embodiments, the driver has endonuclease activity and polymerase activity. In some embodiments, the driver has endonuclease activity and reverse transcriptase activity. In some embodiments, the driver RNA construct expressing the driver/driver polypeptide includes untranslated regions (UTRs) that stabilize the RNA transcript.

[0041] In some embodiments, the gene delivery nucleic acid and the driver nucleic acid are separate nucleic acids, i.e., in trans. In some embodiments, the gene delivery nucleic acid and the driver nucleic acid are present on a single nucleic acid, i.e., in cis. For clarity, in a trans configuration, the gene delivery nucleic acid includes a transgene which may be flanked 5′ and 3′, independently, with one or more regulatory elements. In a trans configuration, in some embodiments the gene delivery nucleic acid includes a transgene which is flanked 5′ and 3′, independently, with one or more regulatory elements. In a cis configuration, the gene delivery nucleic acid includes an adjacent driver nucleic acid and may further include one or more regulatory elements at the termini of the nucleic acid. In a cis configuration, the gene delivery nucleic acid includes an adjacent driver nucleic acid and further includes one or more regulatory elements at the termini of the nucleic acid. These embodiments are further depicted in the drawings.

[0042] The term “efficiency” with respect to gene delivery as used herein refers to the percent of total gene insertions/integrations at the target site. Efficiency can be measured by amplicon sequencing and comparing the number of insertions to non-insertions at a target site and characterizing as a percentage.

[0043] The term “specificity” with respect to gene delivery as used herein refers to the fidelity of insertion at a specific target site. An engineered protein with high specificity would exhibit few or no off-target insertions/integrations compared to insertions into a safe harbor site. Specificity may be measured by amplicon sequencing of known or predicted off-target sites.

[0044] The term “accuracy” with respect to gene delivery as used herein refers to the percentage of correct insertions/integrations (e.g., full sequence insertions/integrations) at the target site and can be measured by sequencing the target site and comparing correct insertions to total insertions at the site of interest.

[0045] The term “fidelity” with respect to gene delivery as used herein refers to the error rate as measured at a per nucleotide basis of the inserted/integrated sequence compared to the desired sequence.

[0046] The term “processivity” with respect to gene delivery as used herein is a measure of the length of insert that may be incorporated in its entirety. In some embodiments, large insertions are desired. A large insertion may be insertion of a nucleic acid sequence of about 20 to about 10,000 bases or more. For example, about 20 bases, about 50 bases, about 100 bases, about 200 bases, about 300 bases, about 400 bases, about 500 bases, about 200 bases, about 300 bases, about 400 bases, about 500 bases, about 750 bases, about 1000 bases, about 1250 bases, about 1500 bases, about 2,000 bases, about 3,000 bases, about 4,000 bases, about 5,000 bases, about 6,000 bases, about 7,000 bases, about 8,000 bases, about 9,000 bases, about 10,000 bases or more.

[0047] Accordingly, some aspects of the application relate to methods and compositions for delivering a transgene (e.g., a heterologous nucleic acid comprising a gene of interest) to a cell by promoting integration of the transgene into a target nucleic acid in the cell (e.g., into a cellular nucleic acid, for example into the genome of the cell). In some aspects, a gene delivery construct (or gene delivery nucleic acid) comprises a transgene (e.g., a heterologous nucleic acid comprising a gene of interest, for example encoding a therapeutic RNA or protein) optionally independently flanked by one or two terminal regions from a retroelement (e.g., 5′ and 3′ regulatory regions of a non-LTR element). In some embodiments, a gene delivery construct (or gene delivery nucleic acid) comprises a transgene flanked by one or two terminal regions from a retroelement (e.g., 5′ and 3′ regulatory regions of a non-LTR element).

[0048] In some embodiments, integration of the transgene from the gene delivery construct into a target nucleic acid is mediated, at least in part, by an engineered protein comprising a retroelement-derived polypeptide which may be referred to herein as “driver” or “driver protein”, and which may be encoded by a “driver nucleic acid”. In some embodiments, the retroelement-derived polypeptide is derived from a non-LTR retroelement. In some embodiments, the engineered protein comprise a retroelement-derived polypeptide fused to a heterologous polypeptide that promotes integration of the transgene into the target nucleic acid (e.g., by increasing integration efficiency, specificity, accuracy, fidelity and/or processivity and/or by redirecting integration to a different location in the target nucleic acid relative to an unmodified retroelement polypeptide). In some embodiments, the engineered protein is encoded by a nucleic acids (e.g., RNA or DNA) that is provided along with a gene delivery construct.

[0049] The nucleic acid encoding the engineered protein may be included on the gene delivery nucleic acid in cis, or alternatively provided on one or more separate nucleic acids (e.g. as a driver nucleic acid) in trans. In some embodiments, the engineered protein is provided as polypeptide along with the gene delivery construct.

[0050] Accordingly, in some embodiments a nucleic acid (e.g., a DNA or RNA) may comprise a sequence of interest (e.g., a transgene that encodes a therapeutic RNA or protein), and in some embodiments a nucleic acid (e.g., a DNA or RNA) may comprise a sequence that encodes an engineered protein. In some embodiments, a DNA that encodes a protein may be transcribed to produce an RNA having a nucleotide sequence that codes for (e.g., can be translated into) a protein (e.g., a therapeutic protein or an engineered protein). In some embodiments, DNA may be transcribed to produce an RNA that itself is functional, for example a regulatory RNA. In some embodiments, the RNA may be a therapeutic RNA.

### Retroelement Polypeptides

[0051] In some embodiments, an engineered protein encoded by a driver construct may comprise a retroelement-derived polypeptide that is a naturally occurring retroelement protein, or variant thereof. In some embodiments, the retroelement-derived polypeptide comprises a nuclease activity. In some embodiments, the retroelement-derived polypeptide comprises a reverse transcriptase activity. In some embodiments, the retroelement-derived polypeptide comprises a nuclease domain. In some embodiments, the retroelement-derived polypeptide comprises a full length, naturally occurring retroelement-derived protein. In some embodiments, the retroelement-derived polypeptide includes one or more amino acid modification relative to a naturally occurring sequence.

[0052] In some embodiments, a retroelement-derived polypeptide is based on a naturally occurring retroelement protein or portion thereof, for example derived from a non-LTR retrotransposon.

[0053] In some embodiments, a retroelement-derived polypeptide disclosed herein is mutated or modified compared to a non-LTR retrotransposons.

### Gene Delivery Constructs

[0054] In some embodiments, an RNA molecule encoded in a gene delivery construct and encoding a transgene contains homology arms having homology to nucleic acid sequences of one or more genomic sites of interest in the human genome, to direct integration to the one or more genomic sites of interest. In some embodiments, each homology arm is independently selected and is from about 4 to about 200 nucleotides in length or more, for example about 4, 10, 15, 20, 25, 30, 35, 45, 50, 55, 60, 65, 70, 75, 80, 85, 90, 95, 100, 200 or more nucleotides in length. In some embodiments, the homology arms correspond to a sequence in the 28S rDNA locus in the human genome. In some embodiments, the homology arms correspond to a sequence in the AAVS1 locus in the human genome. In some embodiments, the nucleic acid sequences of the homology arms are in a reading frame that is different than the open reading frame of the transgene. In some embodiments, the nucleic acid sequences of the homology arms are in the same reading frame as the transgene.

[0055] Accordingly, some aspects of the application relate to methods and compositions for delivering a transgene (e.g., a heterologous nucleic acid comprising a gene of interest) to a cell by promoting integration of the transgene into a target nucleic acid in the cell (e.g., into a cellular nucleic acid, for example into the genome of the cell). In some aspects, a gene delivery construct comprises a transgene (e.g., a heterologous nucleic acid comprising a gene of interest, for example encoding a therapeutic RNA or protein) flanked by one or two terminal regions from a retroelement (e.g., terminal repeats of a long terminal repeat (LTR) element, or 5′ and 3′ regulatory regions of a non-LTR element). In some embodiments, integration of the transgene into a target nucleic acid is mediated, at least in part, by a engineered protein comprising a retroelement-derived polypeptide (e.g., a polypeptide derived from a non-LTR retroelement or from an LTR retroelement). In some embodiments, the engineered protein comprises a retroelement-derived polypeptide fused to a heterologous polypeptide that promotes integration of the transgene into the target nucleic acid (e.g., by increasing integration efficiency and/or by redirecting integration to a different location in the target nucleic acid relative to an unmodified retroelement-derived polypeptide). In some embodiments, the engineered protein can be encoded by one or more nucleic acids (e.g., RNA or DNA) that are provided along with the gene delivery construct (e.g., included on the gene delivery nucleic acid in cis or provided on one or more separate nucleic acids in trans). In some embodiments, the engineered protein can be provided as a polypeptide along with the gene delivery construct.

[0056] Accordingly, in some embodiments, a nucleic acid (e.g., a DNA or RNA) may comprise a sequence of interest (e.g., a transgene that encodes a therapeutic RNA or protein), and in some embodiments a nucleic acid (e.g., a DNA or RNA) may comprise a sequence that encodes an engineered protein. In some embodiments, a DNA that encodes a protein may be transcribed to produce an RNA having a nucleotide sequence that codes for (e.g., can be translated into) a protein (e.g., a therapeutic protein or an engineered protein). In some embodiments, a DNA may be transcribed to produce an RNA that itself is functional, for example a regulatory RNA. In some embodiments, the RNA may be a therapeutic RNA.

[0057] In some aspects, an engineered protein comprises a retroelement-derived polypeptide (e.g., containing a reverse transcriptase) of a naturally occurring retroelement protein or an amino acid sequence variant thereof. In some embodiments, the retroelement-derived polypeptide comprises a full length, naturally occurring retroelement-derived protein. In some embodiments, the retroelement-derived polypeptide includes one or more amino acid modification relative to a naturally occurring sequence.

[0058] In some embodiments, an engineered protein comprises a retroelement-derived polypeptide fused to one or more heterologous polypeptides or domains thereof (e.g., at the N-terminus of the retroelement-derived polypeptide, at the C-terminus of the retroelement-derived polypeptide, internally within the retroelement-derived polypeptide, or any combination thereof).

[0059] In some embodiments, a heterologous polypeptide or domain thereof comprises one or more RNA/DNA processing polypeptides (e.g., RNase H), one or more RNA/DNA repair polypeptides (e.g., Rad51), one or more nucleic acid binding polypeptides, one or more nucleosome binding polypeptides, or any combination thereof. In some embodiments, a heterologous polypeptide or domain thereof may comprise a localization signal, e.g., a nuclear localization sequence (NLS) or a nucleolar localization sequence (NoLS). In some embodiments, a heterologous polypeptide or domain thereof further comprises one or more linkers (e.g., at the N- or C-terminus of the heterologous polypeptide and/or within the heterologous polypeptide, for example between different domains or sequences within the heterologous polypeptide). In some embodiments, an engineered protein comprises a heterologous polypeptide or domain thereof having one or more amino acid substitutions relative to a naturally occurring counterpart. In some embodiments, the engineered protein (e.g., comprising one or more fusions and/or one or more amino acid substitutions) redirects and/or increases the efficiency of integration of a transgene into a target nucleic acid relative to a naturally occurring retroelement protein.

[0060] In some embodiments a gene-delivery construct may include as a transgene (or one transgene out of a plurality of transgenes), a detection peptide to detect integration of the transgene by a given driver. Alternatively, in a cis configuration, a cis driver/transgene construct may comprise, as a transgene (or one transgene out of a plurality of transgenes), the detection peptide. In some embodiments, a detection peptide is a human influenza hemagglutinin (HA), FLAG, green fluorescent protein (GFP or variants such as EGFP), or mCherry peptide.

[0061] As used herein, an RNA/DNA processing polypeptide is an enzyme that directly causes chemical changes to RNA and/or DNA, for example by promoting RNA degradation. As used herein, an RNA/DNA repair polypeptide is a polypeptide that is or interacts with a host repair protein that acts on RNA and/or DNA. As used herein, a host repair protein is a host processing enzyme. As used herein, a nucleic acid binding polypeptide binds to RNA and/or DNA. As used herein, a nucleosome binding polypeptide binds to nucleosomes.

[0062] A “retroelement-derived polypeptide” refers to a polypeptide that is based on one or more naturally occurring proteins encoded by a naturally occurring retroelement or a portion thereof. In some embodiments, the retroelement-derived polypeptide comprises one or more proteins or domains thereof that are found in a retroelement, optionally a wild type or naturally occurring retroelement. In some embodiments, the retroelement-derived polypeptide may be a full length naturally occurring and/or wild type retroelement, or a portion thereof. In some embodiments, a retroelement-derived polypeptide includes at least one of reverse transcriptase domain and endonuclease domain. In some embodiments, retroelement-derived polypeptide may comprise one or more amino acid modifications (e.g. amino acid substitutions, amino acid deletions, amino acid additions, or amino acid truncations) thereby generating a variant that has a different amino acid compared to the one or more naturally occurring proteins. In some embodiments, the naturally occurring retroelement may be a non-LTR retroelement. In some embodiments, the non-LTR retrotransposon is a long-interspersed element polypeptide (LINE) or a short interspersed element (SINE). LINEs (Long INterspersed Elements) and SINEs (Short INterspersed Elements) are non-LTR retrotransposons that are found in almost all eukaryotes, and are among the most common retrotransposons in the human genome. Wild-type LINEs typically encode a reverse transcriptase and an endonuclease. SINEs do not encode reverse transcriptase or endonuclease, and depend on reverse transcriptase and endonuclease encoded by partner LINEs. In some embodiments, the LINE is a LINE-1, a LINE-2, or a LINE-3. In some embodiments, the LINE is from a clade selected from: CRE, R4, Hero, NeSL, R2, RandI, Proto1, L1, Tx1, RTEPT, Proto2, RTEX, RTE, Outcast, Ingi (which includes sub-clade Vingi), I, Nimb, Tad1, Loa, R1, Jockey, Rex1, CR1, L2, L2A, L2B, Daphne, or Crack. In some embodiments, the engineered protein comprises a naturally occurring polypeptide sequence including a reverse transcriptase domain. In some embodiment, a naturally occurring polypeptide including a reverse transcriptase domain is from a group II intron, or a retron.

[0063] In some embodiments, an engineered protein is encoded by a first nucleic acid (e.g., an RNA molecule or a DNA molecule), that can be provided, in trans or in cis, with second a nucleic acid encoding a gene of interest (e.g., flanked by terminal regions). In some embodiments, the first nucleic acid and/or the second nucleic acid comprises one or more chemical and/or sequence modifications. In some embodiments, the modification is an RNA CAP, a modified polyA length (e.g., relative to a natural polyA), a chemical modification (e.g., a pseudouridine and/or a methylpseudouridine), a 5′ UTR modification, a 3′ UTR modification, a modified Kozak sequence, a modified (e.g., truncated) stem loop, an RNA stabilization motif, a 5-methoxyuridine (5-MO-U) modification, a 5-methylcytidine (5mC) modification, or one or more additional and/or modified microsatellites. In some embodiments, a nucleic acid encoding an engineered protein and/or a transgene (e.g., encoding a therapeutic RNA or protein) is codon optimized (e.g., codon optimized for expression in human cells). In some embodiments, codon optimization is for RNA optimization. In some embodiments, RNA optimization comprises reducing the Uracil (U) load of an RNA molecule.

[0064] In some embodiments, a nucleic acid encoding an engineered protein and/or other gene comprises a promoter. In some embodiments, the promoter is a naturally occurring promoter. In some embodiments, the promoter is a recombinant promoter. In some embodiments, the promoter is a constitutive, inducible, and/or tissue or cell specific promoter.

[0065] In some aspects, methods and compositions described in this application are useful for delivering one or more transgenes (e.g., a heterologous nucleic acid comprising a gene of interest) to a host cell and promoting integration of the heterologous nucleic acid into a target nucleic acid (e.g., a genomic nucleic acid) in the host cell, for example for therapeutic purposes (e.g., to provide or supplement expression of an RNA and/or polypeptide that provides a therapeutic benefit to a subject, for example a human subject having a disease or disorder associated with a loss of normal gene function).

[0066] In some aspects, methods and compositions of the application are useful for high efficiency integration of a transgene into a target region (e.g., a sequence specific target) within a target nucleic acid (e.g., within a host genome). In some embodiments, methods and compositions of the application are useful to redirect integration of a transgene to a particular target region (e.g., relative to integration mediated by a naturally occurring protein).

[0067] FIGS. 1A-1E illustrate a non-limiting example of a gene delivery construct. In some embodiments, a gene delivery construct is a nucleic acid (e.g., a DNA or an RNA) comprising a transgene (e.g., a heterologous nucleic acid comprising a gene of interest) flanked by two terminal regions as illustrated in FIG. 1A. In some embodiments, the terminal regions contain sequences recognized by retroelement-derived polypeptides that promote integration of the transgene into a target nucleic acid. In some embodiments, the terminal regions are distinct regions. In some embodiments, the terminal regions are terminal repeat regions. In some embodiments, a terminal region is a 5′ UTR, a 3′ UTR, or a portion thereof (e.g., from a non-LTR retroelement). In some embodiments, a terminal region is a long terminal repeat (LTR) or a portion thereof (e.g., from an LTR retroelement).

[0068] In some embodiments, the one or more engineered proteins (e.g., comprising a retroelement-derived polypeptide, or a retroelement-derived polypeptide fused to a heterologous polypeptide) are encoded on one or more nucleic acids that are distinct and separate from the nucleic acid that comprises the gene of interest (e.g., in trans). A non-limiting example of a trans configuration is illustrated in FIG. 1B. FIG. 1B shows a non-limiting example of a configuration where the gene of interest is flanked by terminal regions on a first nucleic acid and the engineered protein is encoded by a separate second nucleic acid that is distinct from the first nucleic acid. In some embodiments, the second nucleic acid does not contain terminal regions such that only the gene of interest is integrated into the genome of a host cell and the sequences encoding the engineered protein and any other genes that are on the second nucleic acid are not integrated into the host genome. The configuration illustrated in FIG. 1B shows only the engineered protein coding sequence encoded by the second nucleic acid. In some embodiments one or more additional genes also may be included on the first and/or second nucleic acid. As used herein, an engineered protein coding sequence and an engineered protein-encoding nucleic acid are used interchangeably to refer to a nucleic acid (e.g., an RNA or a DNA) comprising a sequence that codes for the engineered protein.

[0069] In some embodiments, one or more engineered proteins (e.g., comprising a retroelement-derived polypeptide, or a retroelement-derived polypeptide fused to a heterologous polypeptide) are encoded on the same nucleic acid that comprises the gene of interest (e.g., in cis). A non-limiting example of a cis configuration is illustrated in FIG. 1C. FIG. 1C shows a configuration with an engineered protein encoding nucleic acid upstream of a gene of interest.

[0070] However, other configurations can be provided, for example including an engineered protein encoding nucleic acid that is downstream from a gene of interest, and/or wherein the engineered protein coding sequence is outside of the terminal repeats (e.g., it is either upstream or downstream from the gene of interest flanked by the terminal repeats).

[0071] A non-limiting example of a trans configuration, in which the gene of interest is integrated into genomic DNA is illustrated in FIG. 1D. FIG. 1D shows a configuration where the gene of interest is flanked by terminal regions on a first nucleic acid (gene delivery construct) and the engineered protein (driver) coding sequence is encoded by a separate second nucleic acid (driver construct) that is distinct from the first nucleic acid. The driver nucleic acid encodes an engineered retroelement-derived polypeptide that promotes integration of the gene of interest into genomic DNA (FIG. 1D). In some embodiments, the gene delivery nucleic acid is DNA. In some embodiments, the gene delivery nucleic acid is RNA. In some embodiments, the driver nucleic acid is DNA. In some embodiments, the driver nucleic acid is RNA. In some embodiments one or more additional genes also may be included on the gene delivery nucleic acid and/or the driver nucleic acid.

[0072] A non-limiting example of a cis configuration, in which the gene of interest and the engineered protein coding sequence are integrated into genomic DNA is illustrated in FIG. 1E.

[0073] The engineered protein coding sequence encodes an engineered retroelement-derived polypeptide that promotes integration of the gene of interest into genomic DNA. Other configurations are envisioned and can be provided, for example including an engineered protein coding sequence that is downstream from the gene of interest, and/or wherein the gene of interest is flanked by terminal repeats but the engineered protein coding sequence is not flanked by the terminal repeats (e.g., it is either upstream or downstream from the gene of interest flanked by the terminal repeats). In some embodiments, the nucleic acid is DNA. In some embodiments, the nucleic acid is RNA.

### Engineered Proteins and Nucleic Acids Encoding the Engineered Proteins

[0074] In some embodiments, a nucleic acid encodes an engineered protein. In some embodiments, the nucleic acid is DNA. In some embodiments, the nucleic acid is RNA. Non-limiting examples of different engineered protein configurations that can be encoded by a nucleic acid are illustrated in FIGS. 2A-2L.

[0075] FIGS. 2A-2L illustrate non-limiting examples of different configurations of an engineered protein comprising a retroelement-derived polypeptide and one or more heterologous polypeptides that can promote and/or redirect integration of a transgene into a target nucleic acid (e.g., into the genome of a cell). In some embodiments, an engineered protein comprises at least one heterologous polypeptide (e.g., comprising one or more RNA/DNA processing polypeptides, RNA/DNA repair polypeptides, nucleic acid binding polypeptides, and/or nucleosome binding polypeptides) fused to the N-terminus of a retroelement-derived polypeptide, the C-terminus of a retroelement-derived polypeptide, and/or internally (e.g., between two domains of a retroelement-derived polypeptide).

[0076] FIG. 2A illustrates a non-limiting example of an engineered protein comprising a retroelement-derived polypeptide that has a heterologous polypeptide fused to its N-terminus.

[0077] FIG. 2B. illustrates a non-limiting example of an engineered protein comprising a retroelement-derived polypeptide that has a heterologous polypeptide fused to its C-terminus.

[0078] FIG. 2C illustrates a non-limiting example of an engineered protein comprising a retroelement-derived polypeptide that has a first heterologous polypeptide fused to its N-terminus and a second heterologous polypeptide fused to its C-terminus.

[0079] In some embodiments, each heterologous polypeptide can itself independently comprise one or more (e.g., two, three, four, or more) different polypeptides (for example one or more of an RNA/DNA processing polypeptide, RNA/DNA repair polypeptide, nucleic acid binding polypeptide, and/or nucleosome binding polypeptide), optionally along with one or more linkers and/or localization sequences.

[0080] FIG. 2D illustrates a non-limiting embodiment of an N-terminal heterologous polypeptide comprising a first domain and a second domain (domain N1 and domain N2). FIG. 2E illustrates a non-limiting embodiment of an N-terminal heterologous polypeptide comprising a linker, a domain, and a nuclear localization sequence (NLS). FIG. 2F illustrates a non-limiting embodiment of a C-terminal heterologous polypeptide comprising a linker, a domain, and an NLS. FIG. 2G illustrates a non-limiting example of an N-terminal heterologous polypeptide comprising a first linker, a first domain, and a first NLS; and a C-terminal heterologous polypeptide comprising a second linker, a second domain, and a second NLS. FIG. 2H illustrates a non-limiting example of an N-terminal heterologous polypeptide comprising a first linker, a first domain, a second linker, a second domain, and an NLS. FIG. 2I illustrates a non-limiting example of a C-terminal heterologous polypeptide comprising a first linker, a first domain, a second linker, a second domain, and an NLS. FIG. 2J illustrates a non-limiting example of an N-terminal heterologous polypeptide comprising a first linker, a first domain, a second linker, a second domain, and a first NLS; and a C-terminal heterologous polypeptide comprising a third linker, a third domain, a fourth linker, a fourth domain, and a second NLS.

[0081] FIG. 2K illustrates a non-limiting example of an N-terminal heterologous polypeptide comprising a first linker, a first domain, a second linker, a second domain, and a first NLS; and a C-terminal heterologous polypeptide comprising a third linker, a third domain, and a second NLS. FIG. 2L illustrates a non-limiting example of an N-terminal heterologous polypeptide comprising a first linker, a first domain, and a first NLS; and a C-terminal heterologous polypeptide comprising a second linker, a second domain, a third linker, a third domain, and a second NLS. However, other configurations can include additional and/or different elements within a heterologous polypeptide that is fused to the N-terminus of a retroelement-derived polypeptide, the C-terminus of the retroelement-derived polypeptide, and/or internally with the retroelement-derived polypeptide.

[0082] In some embodiments, each domain independently comprises an RNA/DNA processing polypeptide, an RNA/DNA repair polypeptide, a nucleic acid binding polypeptide, or a nucleosome binding polypeptide. A linker is optional. In some embodiments, a linker can independently be present or absent in the N-terminal, C-terminal, and/or internal heterologous polypeptide. An NLS is optional. In some embodiments, the NLS is present or absent in the N-terminal, C-terminal, and/or internal heterologous polypeptide. In some embodiments, the relative position of the NLS and/or one or more of the domains and or linkers can be different.

[0083] In some embodiments, the NLS can be fused to the other elements of a heterologous polypeptide via a further optional linker. In some embodiments, a heterologous polypeptide includes an NoLS (e.g., in addition to the NLS or instead of the NLS). In some embodiments, an engineered protein comprises a reverse transcriptase domain, e.g., fused to one or more heterologous polypeptides. In some embodiments, an engineered protein comprises an integrase domain, e.g., fused to one or more heterologous polypeptides.

[0084] In some embodiments, a heterologous polypeptide (e.g., an N-terminal, a C-terminal, and/or an internal heterologous polypeptide) can include more than two domains and/or linkers.

[0085] In some embodiments, an engineered protein comprises one or more domains illustrated in the examples. In some embodiments, an engineered protein has an amino acid sequence of any of SEQ ID NOs: 1-22, 27, 29, 31, 33, 35, 37, 39, 41, 43, 45, 47, 49, 51, 70-246, 248-259, 263-277, 293-307, or 341-368, or an amino acid sequence that is at least 70% identical (e.g., at least 75% identical, at least 80% identical, at least 85% identical, at least 90% identical, at least 95% identical, 99% identical, or 100% identical) to a sequence of any of SEQ ID NOs: 1-22, 27, 29, 31, 33, 35, 37, 39, 41, 43, 45, 47, 49, 51, 70-246, 248-259, 263-277, 293-307, or 341-368.

[0086] In some embodiments, an engineered protein has an amino acid sequence of SEQ ID NO 1. In some embodiments, an engineered protein has an amino acid sequence of SEQ ID NO 2. In some embodiments, an engineered protein has an amino acid sequence of SEQ ID NO 3.

[0087] In some embodiments, an engineered protein has an amino acid sequence of SEQ ID NO 4. In some embodiments, an engineered protein has an amino acid sequence of SEQ ID NO 5. In some embodiments, an engineered protein has an amino acid sequence of SEQ ID NO 6. In some embodiments, an engineered protein has an amino acid sequence of SEQ ID NO 7. In some embodiments, an engineered protein has an amino acid sequence of SEQ ID NO 8. In some embodiments, an engineered protein has an amino acid sequence of SEQ ID NO 9. In some embodiments, an engineered protein has an amino acid sequence of SEQ ID NO 10. In some embodiments, an engineered protein has an amino acid sequence of SEQ ID NO 11. In some embodiments, an engineered protein has an amino acid sequence of SEQ ID NO 12. In some embodiments, an engineered protein has an amino acid sequence of SEQ ID NO 13. In some embodiments, an engineered protein has an amino acid sequence of SEQ ID NO 14. In some embodiments, an engineered protein has an amino acid sequence of SEQ ID NO 15. In some embodiments, an engineered protein has an amino acid sequence of SEQ ID NO 16. In some embodiments, an engineered protein has an amino acid sequence of SEQ ID NO 17. In some embodiments, an engineered protein has an amino acid sequence of SEQ ID NO 18. In some embodiments, an engineered protein has an amino acid sequence of SEQ ID NO 19. In some embodiments, an engineered protein has an amino acid sequence of SEQ ID NO 20. In some embodiments, an engineered protein has an amino acid sequence of SEQ ID NO 21. In some embodiments, an engineered protein has an amino acid sequence of SEQ ID NO 22. In some embodiments, an engineered protein has an amino acid sequence of SEQ ID NO 27. In some embodiments, an engineered protein has an amino acid sequence of SEQ ID NO 29. In some embodiments, an engineered protein has an amino acid sequence of SEQ ID NO 31. In some embodiments, an engineered protein has an amino acid sequence of SEQ ID NO 33. In some embodiments, an engineered protein has an amino acid sequence of SEQ ID NO 35. In some embodiments, an engineered protein has an amino acid sequence of SEQ ID NO 37. In some embodiments, an engineered protein has an amino acid sequence of SEQ ID NO 39. In some embodiments, an engineered protein has an amino acid sequence of SEQ ID NO 41. In some embodiments, an engineered protein has an amino acid sequence of SEQ ID NO 43. In some embodiments, an engineered protein has an amino acid sequence of SEQ ID NO 45. In some embodiments, an engineered protein has an amino acid sequence of SEQ ID NO 47. In some embodiments, an engineered protein has an amino acid sequence of SEQ ID NO 49. In some embodiments, an engineered protein has an amino acid sequence of SEQ ID NO 51. In some embodiments, an engineered protein has an amino acid sequence of any one of SEQ ID NOs 70-246, 248-259, 263-277, 293-307, or 341-368. In some embodiments, an engineered protein is at least 70% identical (e.g., at least 75% identical, at least 80% identical, at least 85% identical, at least 90% identical, at least 95% identical, 99% identical, or 100% identical) to any one of the aforementioned amino acid sequences.

[0088] In some embodiments, an engineered protein is encoded by a nucleic acid. In some embodiments, the nucleic acid encoding an engineered protein is a DNA. In some embodiments, the nucleic acid encoding an engineered protein is an RNA. In some embodiments, a nucleic acid encoding an engineered protein comprises a nucleic acid encoding a heterologous polypeptide. In some embodiments, the nucleic acid has a sequence that is at least 70% identical (e.g., at least 75% identical, at least 80% identical, at least 85% identical, at least 90% identical, at least 95% identical, 99% identical, or 100% identical) to a sequence of any of SEQ ID NOs: 28, 30, 32, 34, 36, 38, 40, 42, 44, 46, 48, 50, 52, 247, 319-326, 328, 397-398 or a fragment of any one thereof that encodes a polypeptide domain.

[0089] In some embodiments, a nucleic acid has the sequence of SEQ ID NO 28. In some embodiments, a nucleic acid has the sequence of SEQ ID NO 30. In some embodiments, a nucleic acid has the sequence of SEQ ID NO 32. In some embodiments, a nucleic acid has the sequence of SEQ ID NO 34. In some embodiments, a nucleic acid has the sequence of SEQ ID NO 36. In some embodiments, a nucleic acid has the sequence of SEQ ID NO 38. In some embodiments, a nucleic acid has the sequence of SEQ ID NO 40. In some embodiments, a nucleic acid has the sequence of SEQ ID NO 42. In some embodiments, a nucleic acid has the sequence of SEQ ID NO 44. In some embodiments, a nucleic acid has the sequence of SEQ ID NO 46. In some embodiments, a nucleic acid has the sequence of SEQ ID NO 48. In some embodiments, a nucleic acid has the sequence of SEQ ID NO 40. In some embodiments, a nucleic acid is at least 70% identical (e.g., at least 75% identical, at least 80% identical, at least 85% identical, at least 90% identical, at least 95% identical, 99% identical, or 100% identical) to any one of the aforementioned nucleic acid sequences.

### Retroelement-Derived Polypeptides and Nucleic Acids Encoding the Retroelement-Derived Polypeptides

[0090] In some embodiments, a nucleic acid encoding an engineered protein comprises a sequence that encodes a retroelement-derived polypeptide. In some embodiments, the nucleic acid is DNA. In some embodiments, the nucleic acid is RNA. Non-limiting examples of different engineered retroelement-derived polypeptides are described herein and are illustrated in the Examples.

[0091] In some embodiments, an engineered protein comprises a retroelement-derived polypeptide. In some embodiments, an engineered protein comprises a modified retroelement-derived polypeptide, for example a retroelement-derived polypeptide that includes one or more amino acid modifications relative to a naturally occurring counterpart. In some embodiments, the retroelement-derived polypeptide, which may be a modified retroelement-derived polypeptide, is fused to one or more heterologous polypeptides (e.g., N-terminally, C-terminally, and/or internally).

[0092] In some embodiments, a retroelement-derived polypeptide comprises a reverse transcriptase domain of a retroelement. Non-LTR and LTR retroelements typically encode multi-domain proteins having several enzymatic activities, for example including a reverse transcriptase domain, e.g., from a POL protein of an LTR-RE or an ERV (endogenous retrovirus). In some embodiments, a reverse transcriptase domain is modified to include one or more amino acid modifications relative to a naturally occurring reverse transcriptase domain. In some embodiments, a reverse transcriptase domain is fused to one or more heterologous polypeptides that can promote integration of a transgene flanked by terminal regions (e.g., terminal repeat regions or regulatory sequences), and/or redirect integration of the transgene to a different target sequence. In some embodiments, the retroelement-derived polypeptide is an integrase domain (e.g., from a protein encoded by a retroelement). In some embodiments, an integrase domain is modified to include one or more amino acid modifications relative to a naturally occurring integrase domain. In some embodiments, an integrase domain is fused to one or more polypeptides that can promote and/or redirect integration of a transgene.

[0093] In some embodiments, an engineered protein comprises a retroelement-derived polypeptide together with one or more additional domains from a naturally occurring protein (e.g., one or more other domains of a POL protein or an ORF protein) fused to a heterologous polypeptide.

[0094] In some embodiments, a retroelement-derived polypeptide is a full-length or essentially full-length protein comprising a retroelement enzyme domain (e.g., a full-length or essentially full-length POL or ORF protein). In some embodiments, an ORF protein is an ORF2 protein (e.g., of LINE-2 retroelement). In some embodiments, a retroelement-derived polypeptide comprises a reverse transcriptase domain, e.g., from a murine leukemia virus.

[0095] In some embodiments, the retroelement-derived polypeptide (e.g., reverse transcriptase domain and/or integrase domain) comprises a sequence from an LTR retrotransposon or an ERV. In some embodiments, the reverse transcriptase domain comprises a sequence from a non-LTR retrotransposon. In some embodiments, the reverse transcriptase domain comprises a sequence from a LINE-1, a LINE-2, or a LINE-3 retrotransposon. In some embodiments, the reverse transcriptase domain comprises a sequence from a retrotransposon of clade CRE, R4, Hero, NeSL, R2, RandI, Proto1, L1, Tx1, RTEPT, Proto2, RTEX, RTE, Outcast, Ingi (which includes sub-clade Vingi), I, Nimb, Tad1, Loa, R1, Jockey, Rex1, CR1, L2, L2A, L2B, Daphne, or Crack. In some embodiments, the reverse transcriptase domain comprises a sequence from a LINE 2-2 (L2-2) retrotransposon from clade L2. In some embodiments, the LINE 2-2 retrotransposon is a zebrafish LINE 2-2 (ZFL2-2) retrotransposon.

[0096] In some embodiments, a LINE-1, LINE-2, LINE-3, CRE, R4, Hero, NeSL, R2, RandI, Proto1, L1, Tx1, RTEPT, Proto2, RTEX, RTE, Outcast, Ingi (optionally sub-clade Vingi), I, Nimb, Tad1, Loa, R1, Jockey, Rex1, CR1, L2, L2A, L2B, Daphne, or Crack retrotransposon contains a 5′ UTR, an ORF1, an ORF2, a 3′ UTR, or a combination thereof. In some embodiments, the ORF2 contains a reverse transcriptase and an endonuclease domain. In some embodiments, an ORF2 has an apurinic endonuclease (APE) and/or a restriction enzyme like endonuclease (RLE), for example at the N-terminus or at the C-terminus.

[0097] In some embodiments, a reverse transcriptase domain is a variant reverse transcriptase domain. In some embodiments, a variant reverse transcriptase domain comprises at least one amino acid substitution that improves at least one of stability, interaction with RNA, or interaction with DNA relative to an unsubstituted reverse transcriptase domain. In some embodiments, the variant reverse transcriptase domain comprises at least one amino acid substitution that stabilizes its association with RNA or DNA relative to an unsubstituted reverse transcriptase domain. In some embodiments, the amino acid substitution adds a positive charge (e.g., via the addition of lysine or arginine), removes a negative charge (e.g., via the removal of an aspartate or glutamate), alters at least one H-bond forming residue, or alters at least one S-bond forming residue. In some embodiments, the amino acid substitution corresponds to a substitution of certain amino acids in the amino acid sequence of a LINE 2-2 reverse transcriptase. In some embodiments, the amino acid substitution corresponds to a substitution selected from the group consisting of D550T, D770H, K815R, S883R, K952R, K542R, N546R, H569R, S577R, H463K, Q478K, K566R, and K815R relative to SEQ ID NO: 51, which is an amino acid sequence of a Line 2-2 retroelement protein.

[0098] Accordingly, in some embodiments, a recombinant reverse transcriptase domain is a variant of a reverse transcriptase domain from an LTR retrotransposon. In some embodiments, the recombinant reverse transcriptase domain is a variant of a reverse transcriptase domain from a non-LTR retrotransposon.

[0099] In some embodiments, a reverse transcriptase domain comprises a reverse transcriptase sequence from an LTR-RE or an ERV. In some embodiments, a recombinant reverse transcriptase domain comprises a reverse transcriptase domain sequence from a non-LTR element, for example from a LINE-1 or LINE-2 retrotransposon, having at least one stabilizing amino acid substitution. In some embodiments, a recombinant reverse transcriptase domain comprises a reverse transcriptase domain sequence from a LINE 2-2 retrotransposon having at least one stabilizing amino acid substitution. In some embodiments, the LINE 2-2 retrotransposon is from a zebrafish. In some embodiments, the amino acid substitution corresponds to a substitution of a LINE 2-2 reverse transcriptase. In some embodiments, the amino acid substitution corresponds to a substitution selected from the group consisting of I625L, H521P, S737P, P705A, M558L, M733L, M760S, M750L, A757P, H717A, H717K, D497S, I625H, L825G, D278S, L837I, A464P, K762R, A948T, P675S, H698P, L742P, E541K, Q547R, S814P, S672P, N560P, H853P, L514P, L524P, Q449P, H650P, G674P, S800P, I896P, S474P, and D520P relative to SEQ ID NO: 51, which is an amino acid sequence of a Line 2-2 retroelement protein.

[0100] In some embodiments, a stabilizing amino acid substitution (e.g., in a reverse transcriptase domain or an integrase domain) is an amino acid substitution that improves packing of hydrophobic residues in the core of the domain, stabilizes a loop region, and/or alters electrostatic, H-bond stability, or S-bond stability. In some embodiments, the substitution and/or addition that stabilizes a loop region is a proline substitution. In some embodiments, the substitution that alters electrostatic, H-bond stability, or S-bond stability adds a positive charge, for example by mutation to lysine or arginine, or mutation from aspartate or glutamate to a non-charged residue such as alanine.

[0101] In some embodiments, a retroelement-derived polypeptide (e.g., a reverse transcriptase and/or integrase domain) is fused to an endonuclease domain. In some embodiments, the endonuclease domain is derived from the same protein (e.g., a LINE-1 or a LINE-2 ORF2) as the reverse transcriptase domain. In some embodiments, the endonuclease domain is heterologous to the reverse transcriptase domain (e.g., derived from a different protein). In some embodiments, a heterologous endonuclease includes but is not limited to a Cas nuclease (e.g., a Cas9 nuclease), a Cas9 nickase (e.g., SpCas9 with a H840 mutation), a homing endonuclease, or a FokI nuclease.

[0102] In some embodiments, a recombinant endonuclease domain comprises at least one amino acid substitution that improves its association with DNA relative to an unsubstituted endonuclease domain. In some embodiments, the amino acid substitution corresponds to a substitution of a LINE 2-2 endonuclease domain. In some embodiments, the amino acid substitution corresponds to a substitution selected from the group consisting of Y139K and D64K relative to SEQ ID NO: 51.

[0103] In some embodiments a retroelement-derived polypeptide comprises a polypeptide encoded by a ZFL2-2 retrotransposon. In some embodiments, the ZFL2-2 polypeptide is a modified ZFL2-2 polypeptide. In some embodiments, a modified ZFL2-2 comprises one or more amino acid modifications relative to a naturally occurring ZFL2-2. In some embodiments, a modified ZFL2-2 has an RNA binding mutation. In some embodiments, a modified ZFL2-2 has a mutation that stabilizes the ZFL2-2 protein. In some embodiments, a modified ZFL2-2 has a mutation that inhibits the endonuclease activity of the ZFL2-2 protein.

[0104] In some embodiments a retroelement-derived polypeptide comprises a polypeptide encoded by Vingi-1 retrotransposon. In some embodiments, the Vingi-1 polypeptide is a modified Vingi-1 polypeptide. In some embodiments, a modified Vingi-1 comprises one or more amino acid substitutions relative to a naturally occurring Vingi-1. In some embodiments, a modified Vingi-1 has an RNA binding mutation. In some embodiments, a modified Vingi-1 has a mutation that stabilizes the Vingi-1 protein. In some embodiments, a modified Vingi-1 has a mutation that inhibits the endonuclease activity of the Vingi-1 protein.

[0105] In some embodiments, a retroelement-derived polypeptide has a modification that inactivates its enzymatic activity. In some embodiments, the modification comprises a deletion. In some embodiments, the modification comprises one or more mutations (e.g., point mutations). In some embodiments, the modification is in the endonuclease domain. In some embodiments, the modification is in the integrase domain. In some embodiments, the modification is in the reverse transcriptase domain. In some embodiments, the modification is in the PCNA-interaction peptide (PIP) motif. For example, in some embodiments a heterologous endonuclease domain (e.g., a Cas domain) is fused to a retroelement-derived polypeptide (e.g., a LINE 2-2 polypeptide) that comprises a modification in its endonuclease domain. For example, in some embodiments a UL12 polypeptide is fused to a retroelement-derived polypeptide (e.g., a LINE 2-2 polypeptide) that comprises a modification in its PIP motif.

### Heterologous Polypeptides and Nucleic Acids Encoding the Heterologous Polypeptides

[0106] In some embodiments, a nucleic acid encoding an engineered protein comprises a sequence that encodes a heterologous polypeptide fused to a retroelement-derived polypeptide. In some embodiments, the nucleic acid is DNA. In some embodiments, the nucleic acid is RNA. Non-limiting examples of different heterologous polypeptides are described herein and are illustrated in the Examples.

[0107] In some embodiments, a retroelement-derived polypeptide (e.g., a reverse transcriptase or integrase domain) is fused to one or more heterologous polypeptides that can promote and/or redirect integration of a transgene (e.g., a heterologous nucleic acid comprising a gene of interest). Non-limiting examples of heterologous polypeptides that can promote and/or redirect integration of a transgene include RNA/DNA processing polypeptides, RNA/DNA repair polypeptides, nucleic acid binding polypeptides, and/or nucleosome binding polypeptides. In some embodiments, an engineered protein comprising a retroelement-derived polypeptide fused to a heterologous polypeptide further comprises a localization signal (e.g., a nuclear localization sequence or a nucleolar localization sequence). In some embodiments, an engineered protein comprising a retroelement-derived polypeptide fused to a heterologous polypeptide further comprises one or more linkers (e.g., at the N- or C-terminus of the heterologous polypeptide and/or within the heterologous polypeptide, for example between different domains within the heterologous polypeptide).

[0108] In some embodiments, a retroelement-derived polypeptide (e.g., a reverse transcriptase or integrase domain) is fused to one or more RNA/DNA processing polypeptides (e.g., N-terminally, C-terminally, and/or internally).

[0109] In some embodiments, an RNA/DNA processing polypeptide comprises an enzyme that directly causes chemical changes to RNA and/or DNA molecules, for example by promoting degradation of RNA. In addition to interacting with host cell repair and DNA-damage response proteins, proteins that directly process and/or repair RNA/DNA intermediates involved in retrotransposition also may improve retrotransposition efficiency. In some embodiments, an RNA/DNA processing polypeptide improves retrotransposition efficiency and/or redirects retrotransposition to a different target location (e.g., within the genome of a cell).

[0110] In some embodiments, the RNA/DNA processing polypeptide is an RNase H domain, or the catalytic region thereof. In some embodiments, an RNase H domain is a prokaryotic RNase H1 domain (e.g., an E. coli RNase H1 domain) or a eukaryotic RNase H1 domain (e.g., a human RNase H1 domain). In some embodiments, the RNA/DNA processing polypeptide is an E. coli RNase H1 domain. Reverse transcription of an RNA template containing a transgene generates an RNA/DNA intermediate which requires processing by cellular RNase H to remove the RNA.

[0111] In some embodiments, the RNA/DNA processing polypeptide is a DNA polymerase, or the catalytic region thereof, or an accessory subunit thereof. In some embodiments, the DNA polymerase is a DNA polymerase associated with DNA damage repair. In some embodiments, the RNA/DNA processing polypeptide is PolD3.

[0112] In some embodiments, the RNA/DNA processing polypeptide is a RAD51 protein domain. RAD51 is a protein involved in the homology directed repair (HDR) pathway.

[0113] In some embodiments, a retroelement-derived polypeptide (e.g., a reverse transcriptase or integrase domain) is fused to one or more RNA/DNA repair polypeptides (e.g., N-terminally, C-terminally, and/or internally).

[0114] In some embodiments, an RNA/DNA repair polypeptide is a protein that interacts with host repair proteins (e.g., a repair protein in the host cell). In some embodiments, a host repair protein is a host processing enzyme (e.g., a host DNA repair protein). In some embodiments, host repair proteins are non-homologous end joining (NHEJ) pathway proteins, mismatch repair (MMR), microhomology-mediated end-joining (MMEJ), or homology directed repair (HDR) pathway proteins, or other DNA damage response proteins. In some embodiments, an RNA/DNA repair polypeptide promotes homology directed repair (HDR). In some embodiments, the RNA/DNA repair polypeptide is a CtIP-derived polypeptide, a RecT-derived polypeptide, an HSV-1 alkaline nuclease-derived polypeptide, a BRCA2-derived polypeptide, a DSS1-derived polypeptide, a nanog-derived polypeptide, an NBN-derived polypeptide, a RAD17-derived polypeptide, an ANKRD28-derived polypeptide a PCNA interaction motif polypeptide, a MDC1-derived polypeptide, a MSH4-derived polypeptide, a SCML1-derived polypeptide, a CDKN2A-derived polypeptide, a 53BP1 inhibitor, or a p53 inhibitor.

[0115] A CtIP-derived polypeptide is capable of recruiting cellular HDR factors. A RecT-derived polypeptide is capable of promoting ssDNA strand invasion. In some embodiments, a RecT-derived polypeptide is derived from a Pseudomonas aeruginosa RecT. An HSV-1 alkaline nuclease-derived polypeptide (e.g., a UL12 polypeptide) is capable of recruiting the MRN complex and promoting HDR and MMEJ. A BRCA2-derived polypeptide is capable of modulating RAD51 and promoting HDR. A DSS1-derived polypeptide is capable of recruiting RAD52. A Nanog-derived polypeptide can inhibit Rad51, which is important for HDR, thereby inducing repression of HDR. An NBN (Nibrin) polypeptide is capable of interacting with and recruiting MRE11 to form the MRN complex, which is involved in both HDR and MMEJ. A RAD17 polypeptide is capable of interacting with and recruiting factors involved in double-strand break repair.

[0116] In some embodiments, the DNA/RNA repair polypeptide is a PCNA interaction motif (PIP motif) is a peptide believed to recruit the cellular PCNA protein which may act as a processivity factor and may be involved in DNA repair and synthesis. RTEs may also include native PIP motifs. In some embodiments, the native RTE PIP motif is replaced with a PIP motif from another protein (such as p21, FEN1 or CHAF1A) which may improve PCNA recruitment.

[0117] In some embodiments, PIP motifs may be added as a polypeptide in the C-terminal or N-terminal of RTE protein.

[0118] In some embodiments, the RNA/DNA repair polypeptide is an inhibitor of p53. Without wishing to be bound to theory, cellular DNA damage response pathways may act to broadly inhibit genome editing, for example p53 can cause senescence of edited cells.

[0119] In some embodiments, the p53 inhibitor is a MDM2-derived peptide, or a peptide 14-derived peptide. MDM2 interacts with and represses p53. A synthetic polypeptide that inhibits p53 can be used to enhance local repression of p53 when delivered together (e.g., in trans) with a retroelement-derived polypeptide.

[0120] In some embodiments, the RNA/DNA repair polypeptide is an inhibitor of 53BP1 (p53 binding protein 1). In some embodiments, the 53BP1 inhibitor is an i53 peptide (an engineered ubiquitin variant that has a high binding affinity to 53BP1), or a synthetic peptide. Without wishing to be bound to theory, cellular DNA damage repair may follow the Non-homologous End Joining (NHEJ). 53BP1 is a key regulator of DSB repair pathway in eukaryotic cells and suppresses end resection, thus favoring NHEJ over HDR.

[0121] In some embodiments, the heterologous polypeptide is a host factor interaction peptide. Without being bound by theory, a host factor interaction peptide inhibits host defense against retroelements. In some embodiments, the host defense is based around APOBEC3 deaminases.

[0122] Without wishing to be bound by theory, APOBEC3-catalyzed deamination of RNA/DNA intermediates can inhibit retrotransposition. In some embodiments a host factor interaction peptide inhibits APOBEC3 deamination. In some embodiments, the host factor interaction peptide is derived from HIV Viral Infectivity Factor (VIF).

[0123] The precise class of host cell proteins will depend on the mechanism of integration (e.g., depending on the retroelement-derived polypeptide that is used along with the terminal regions that flank the transgene). In a non-limiting example, retroelements that integrate into a precise location in the genome may rely on an HDR-based integration mechanism, while retroelements that integrate into a random location in the genome may rely on NHEJ or MMEJ-based mechanisms. Activating the corresponding repair pathway while suppressing the alternative repair pathways may increase the efficiency of desired retrotransposition.

[0124] In some embodiments, a retroelement-derived polypeptide (e.g., a reverse transcriptase or integrase domain) is fused to one or more nucleic acid binding polypeptides (e.g., N-terminally, C-terminally, and/or internally).

[0125] In some embodiments, such nucleic acid binding polypeptide binds RNA and/or DNA. In some embodiments, the nucleic acid binding polypeptide comprises a non-sequence specific DNA binding domain. In some embodiments, the nucleic acid binding polypeptide comprises a sequence specific DNA binding domain. In some embodiments, the non-sequence specific DNA binding domain is a Sto7d DNA binding domain or a Sso7d DNA binding domain. In some embodiments the non-sequence specific DNA binding domain is the T4 phage sliding clamp GP45. In some embodiments, sequence specific DNA binding domains include CRISPR proteins, zing finger proteins, TALES, and the like. Exemplary sequence specific DNA binding domains include, but are not limited to, Cas9 (e.g., dCas9, a SpCas9 with mutations D10A and H840A), a Zinc finger DNA binding domain, a zinc finger targeting AAVS1, and a Transcription activator-like effector (TALE) DNA binding domain. In some embodiments, a sequence-specific endonuclease also may be used to replace a native endonuclease domain of a retroelement-derived polypeptide.

[0126] In some embodiments, site-specific endonuclease domains also may be used to replace the native endonuclease of retroelements, thus redirecting the native endonuclease activity to another site. Such domains may retarget integration to a site of interest. Non-limiting examples of an endonuclease fusion/replacement include a site-specific homing endonuclease targeting the a gene fused to retroelement-derived polypeptide deficient in endonuclease activity, either through an inactivating mutation in the nuclease domain (e.g., by a D237A, H238 substitution, and/or D216A in an L2-2 domain or a corresponding mutation in an alternative domain), or through a deletion of the entire predicted endonuclease domain. Similarly, a homing endonuclease nickase variant may be used to introduce a single-strand break instead of a double-strand break. Other non-limiting examples include a Cas9 nuclease or nickase fused to an endonuclease-deficient retroelement-derived polypeptide.

[0127] In some embodiments, a retroelement-derived polypeptide (e.g., a reverse transcriptase or integrase domain) is fused to one or more nucleosome binding polypeptides (e.g., N-terminally, C-terminally, and/or internally).

[0128] In some embodiments, a nucleosome binding polypeptide binds to nucleosomes. In some embodiments, a nucleosome binding polypeptide is a chromatin modulating polypeptide.

[0129] In some embodiments, a nucleosome binding polypeptide alters chromatin accessibility. In some embodiments, a nucleosome binding polypeptide alters the activity of genome editing proteins.

[0130] In some embodiments, a nucleosome binding polypeptide comprises an HMGN1 polypeptide, an HMGB1 polypeptide, or a StkC DNA binding domain. In some embodiments, a nucleosome binding polypeptide comprises an HMGN1 polypeptide. In some embodiments, a nucleosome binding polypeptide comprises an HMGB1 polypeptide. In some embodiments, a nucleosome binding polypeptide comprises a StkC DNA binding domain.

[0131] In some embodiments, a heterologous polypeptide further comprises a localization signal (e.g., a nuclear localization sequence or a nucleolar localization sequence). In some embodiments, a heterologous polypeptide further comprises one or more linkers (e.g., at the N- or C-terminus of the heterologous polypeptide and/or within the heterologous polypeptide, for example between different domains within the heterologous polypeptide).

[0132] In some embodiments, a nuclear localization sequence (NLS) or a nucleolar-localization sequence (NoLS) is included in an engineered protein (or is encoded by a nucleic acid that encodes the engineered protein). In some embodiments, an NLS comprises an SV40 sequence (e.g., PKKKRKV SEQ ID NO: 54), a nucleoplasmin sequence (e.g., KRPAATKKAGQAKKKK SEQ ID NO: 55), or a bipartite SV40 sequence (e.g., KRTADGSEFESPKKKRKV SEQ ID NO: 56). In some embodiments, a NoLS comprises a PNRC sequence (e.g., PKKRRKKK SEQ ID NO: 57), a poly R sequence (e.g., RRRRRRR SEQ ID NO: 58), or a H2B sequence (e.g., KKRKRSRK SEQ ID NO: 59) or TOPBP1 sequence (e.g., KKKSKK SEQ ID NO: 269), or PARP1 sequence (e.g., RQRKRHK SEQ ID NO: 277), or Mdm2sequence (e.g., PSQQKRK SEQ ID NO: 268). The charge and length of NLS and NoLS linkers can affect their ability to mediate localization.

[0133] In some embodiments a retroelement-derived polypeptide (e.g., reverse transcriptase and/or integrase domain) is fused to a heterologous polypeptide via a linker. In some embodiments, the linker is a rigid linker. In some embodiments, the linker is a flexible linker. In some embodiments, the linker is a cleavable linker. Flexible linkers are generally made up of small, non-polar (e.g., Gly) or polar (e.g., Ser or Thr) amino acids. Alternating Gly and Ser residues provides flexibility. Solubility of the linker and associated sequences may be enhanced by the inclusion of charged residues, e.g., two positively charged residues (e.g., Lys) and one negatively charged residue (e.g., Glu). In some embodiments, the linker is from 2 to 35 amino acids long.

### Transgenes

[0134] In some aspects, one or more engineered proteins and/or nucleic acids encoding the engineered protein(s) are provided along with a gene delivery construct (e.g., a DNA or RNA molecule) comprising a transgene (e.g., a heterologous nucleic acid comprising a gene of interest) to be delivered to a cell or a subject (e.g., to be integrated into a target locus, for example within the genome of the cell).

[0135] In some embodiments, a gene delivery construct comprises a heterologous nucleic acid sequence flanked by one or more terminal repeat regions from a non-LTR or an LTR retroelement (e.g., an LTR-RE or an ERV). In some embodiments, a heterologous nucleic acid is a nucleic acid that is not naturally flanked by the terminal repeat regions.

[0136] In some embodiments, the heterologous nucleic acid encodes a gene of interest. In some embodiments, the gene of interest encodes an RNA of interest (e.g., a therapeutic RNA, a regulatory RNA, or an RNA enzyme). In some embodiments, the RNA is a messenger RNA (mRNA), antisense RNA (asRNA), RNA interference (RNAi), or an RNA aptamer. In some embodiments, the RNA is an mRNA that encodes a therapeutic protein.

[0137] Accordingly, in some embodiments, a gene of interest encodes a therapeutic RNA, a regulatory RNA, an mRNA, an RNA enzyme, or other RNA. A regulatory RNA can be an siRNA, an miRNA, an antisense RNA, or other regulatory RNA. In some embodiments, an encoded RNA is an aptamer. An mRNA can be an RNA that encodes a protein of interest (for example a protein that has therapeutic, diagnostic, and/or other properties). Non limiting examples of proteins of interest include antibodies, regulatory proteins, hormones, cytokines, structural proteins, enzymes, membrane proteins, and other useful therapeutic or diagnostic proteins. Such proteins can be naturally occurring proteins or modified proteins (e.g., containing one or more amino acid substitutions relative to a naturally occurring counterpart protein). In some embodiments, a heterologous nucleic acid can encode one or more genes of interest (e.g., one or more regulatory RNAs and/or proteins of interest).

[0138] In some embodiments, non-limiting examples of a gene of interest include the genes that encode Factor VIII, Factor IX, Phenylalanine hydroxylase, ATP7B, alpha glucosidase, argininosuccinate synthetase, galactose-1-phosphate uridyltransferase, ornithine transcarbamylase, or and the like.

[0139] In some embodiments, the heterologous nucleic acid encodes two or more genes of interest.

### Terminal Regions

[0140] In some embodiments, a gene delivery construct is a nucleic acid (e.g., a DNA or an RNA) comprising a heterologous nucleic acid (e.g., encoding one or more genes of interest) flanked by two terminal regions. These terminal regions may be different when the gene delivery constructs are in trans, i.e. the retrotransposon protein (driver) and transgene (reporter) are encoded by different mRNA.

[0141] In some embodiments, the terminal regions are from a non-LTR retrotransposon (e.g., 5′ and/or 3′ UTRs from a non-LTR retrotransposon). In some embodiments, the terminal regions are sequences from a LINE-1, LINE-2, LINE-3/CR-1, CRE, R4, Hero, NeSL, R2, RandI, Proto1, L1, Tx1, RTEPT, Proto2, RTEX, RTE, Outcast, Ingi (optionally sub-clade Vingi), I, Nimb, Tad1, Loa, R1, Jockey, Rex1, CR1, L2, L2A, L2B, Daphne, or Crack retrotransposon. In some embodiments, the terminal regions are sequences from a LINE 2-2 retrotransposon (e.g., a fish LINE 2-2 retrotransposon). In some embodiments, the terminal regions are sequences from a Vingi-1 retrotransposon (e.g., a lizard Vingi-1 retrotransposon).

[0142] In some embodiments, a 5′ UTR is a human globin 5′ UTR and/or comprises a Kozak sequence. In some embodiments a 5′UTR is from a zebrafish LINE 2-2 (ZFL2-2), zebrafish LINE 2-1 (ZFL2-1), UnaL2, or Vingi-1. In some embodiments, the ZFL2-2 5′ UTR sequence is AGAGATATCCCTAGCTAGTTCACCGCGGCAGCGGTCGCGGCAGCCTCGTGTGAAGA CCGACGAGGGTAAAGACCATCGACTCTACCTGCGCGACTCCACCGAGCAAAGACAC CGACAAAGCACTTGAGTACTTTACTTTATTGTTTTACTTTACACTTATTTTTTGTTGTC AGTGCACTTTTATT (SEQ ID NO: 64). In some embodiments, the ZFL2-1 5′ UTR sequence is GCGGCCGCTCGAGCATCCGCCTGTTGTTTGTAGCTTTAGCCTGCTAGCGCCGCTGGT CAGCTAAAGCTACCGACCTCTTTAACCATACACTTACTGGCTTTGCTCTTTACCCCGT AAA (SEQ ID NO: 65). In some embodiments, the UnaL2 3′ UTR sequence is TCGACCCACTACCAGGGGAGTCAGGAGAGGTGCAGACGTGGCATCAGTGTGCATCT GATTGTGTCGTCGCTTCTGCCGTCCCCCGCGATTCAGATAAGCGTATCTTAACTTGA TTTGTCTCTGCTGTTGCTAGTTAGAGAACATAGTTGTGCGTAATTTAGATAATCTTTT TTAAACGTGTCTTTACTGTTGCTAGTCAGCGAACTTAGTTGTGCGTTAGCTGAGAAT CTCTGTAGTTGACTCACTGTTGTTAGTTAGTTAAACGCGTTAGTGAAACTGTGTGTG GGGGTTGGTGTTTAACTGCCCGGTATTGTTGAGCTAATTTCAAGTAGCTTCACCTGG TGCTTATCTGCCTTAATGAAGGTGATGCAAGCACGTAATTGTCACCCGGTATTTATA GCTCCAGCGGAGGCTGCCATaGGCAGCCTCGTCGTCAGTTTGTG (SEQ ID NO: 66). In some embodiments the Vingi-1 5′UTR is: GGGGGACACGGAAAGAGCCTCCCCGAAGATTGAGTgAATTCAGTCGGGCGTCCCCT GGGCAACGTTTCTTGTAAGCGGCCGATCTTTCCAcCCCAAAAGCATTGGATGa (SEQ ID NO:67)

[0143] In some embodiments, a 3′ UTR is from a zebrafish LINE 2-2 (ZFL2-2), zebrafish LINE 2-1 (ZFL2-1), or UnaL2. In some embodiments, the ZFL2-2 3′ UTR sequence is TGAAACTTGCCTTTAGTACTTATTCATTGTTGCTCTTAGTTGTGTAAATTGCTTCCTT GTCCTCATTTGTAAGTCGCTTTGGATAAAAGCGTCTGCTAAATGACTAAATGTAAAT GTAAATGTAAA (SEQ ID NO: 60). In some embodiments, the ZFL2-1 3′ UTR sequence is GGATCCTGACCATTTATGTGAAGCTGCTTTGACACAATCTACATTGTAAAAGCGCTA TACAAATAAAGCTGAATTGAATTGAATTGAAT (SEQ ID NO: 61).

In some embodiments, the UnaL2 3′ UTR sequence is:
(SEQ ID NO: 62)
CACTTGTATTTGTCTTTGTCCTAATACTGTAGCTTACTCTTCTGCCTAG
TTGGCTTTGCACAGGTTAGGTTAGAATAGTGTTCACTGTGTGAACTGTG
TTCTTAGCTAGAAATAGCTGTACAAAATAAGTATTATACCTTTCTGAAC
TTGTGTTCAGCAGATGCCTACGACCATGATATGCACTTTTGTACGTCGC
TTTGGATAAAAGCGTCTGCGAAATAAATGTAATGTAATGTAATGTAA.
In some embodiments the Vingi-1 3′UTR sequence is:
(SEQ ID NO: 67)
TTGCTTGTGATTTCTTTTCTTTTtTaTTTTATTTCCATTATTTGAAATG
TATTTGcTGTAcCAATGCTTTTGACACGAAATAAATAAA.
In some embodiments the 3′UTR is from human beta
globin, which may have the sequence of:
(SEQ ID NO: 68)
GCTCGCTTTCTTGCTGTCCAATTTCTATTAAAGGTTCCTTTGTTCCCTA
AGTCCAACTACTAAACTGGGGGATATTATGAAGGGCCTTGAGCATCTGG
ATTCTGCCTAATAAAAAACATTTATTTTCATTGCAA.
In some embodiments the 3′UTR is from human alpha
globin, which may have the sequence of:
(SEQ ID NO: 69)
GCTGGAGCCTCGGTGGCCATGCTTCTTGCCCCTTGGGCCTCCCCCCAGC
CCCTCCTCCCCTTCCTGCACCCGTACCCCCGTGGTCTTTGAATAAAGTC
TGAGTGGGCGGCA.

[0144] In some embodiments, a gene delivery construct is a nucleic acid (e.g., a DNA or an RNA) comprising a transgene (e.g., heterologous nucleic acid encoding one or more genes of interest) flanked by terminal regions from a non-LTR retrotransposon. In some embodiments, the terminal regions comprise one or more UTRs (e.g., a 5′ UTR and a 3′ UTR). In some embodiments, the terminal regions include one or more regions from a 5′ UTR and/or a 3′ UTR (e.g., a portion of one or both UTRs) from a non-LTR retroelement.

[0145] In some embodiments, a terminal region of a gene delivery construct comprises a regulator region of a non-LTR retroelement, for example, one or more 5′ UTR and/or 3′ UTR terminal regions (e.g., from a LINE-1, LINE-2, LINE-3/CR-1, CRE, R4, Hero, NeSL, R2, RandI, Proto1, L1, Tx1, RTEPT, Proto2, RTEX, RTE, Outcast, Ingi (optionally sub-clade Vingi), I, Nimb, Tad1, Loa, R1, Jockey, Rex1, CR1, L2, L2A, L2B, Daphne, or Crack retrotransposon). In some embodiments, the regulatory region comprises a full or partial 5′ UTR or 3′ UTR. For example, in some embodiments the 3′ UTR of a LINE-2-2 comprises a conserved Stem Loop (SL) region and a variable number of a microsatellite repeats (e.g., a minimal 3′ UTR required for efficient retrotransposition).

[0146] Accordingly, in some embodiments the terminal regions flanking a gene of interest are not identical sequences. In some embodiments, 3′ UTR terminal regions are approximately 200-600 nucleotides long (e.g., fish LINE-2-2 retrotransposons). In some embodiments, 3′ UTR terminal regions of a gene delivery construct are from natural non-LTR retroelements (non-LTR-REs). In some embodiments, 3′ UTR terminal regions are selected from non-LTR-REs regions found in plants, fungi, insects, and vertebrates (e.g., found in eukaryotes, for example in vertebrates, for example in mammals, for example in humans). Non-limiting examples of non-LTR-REs from which 3′ UTR terminal regions can be used include elements from clades CRE, R4, Hero, NeSL, R2, RandI, Proto1, L1, Tx1, RTEPT, Proto2, RTEX, RTE, Outcast, Ingi (which includes sub-clade Vingi), I, Nimb, Tad1, Loa, R1, Jockey, Rex1, CR1, L2, L2A, L2B, Daphne, and Crack.

[0147] In some embodiments, the terminal regions comprise one or more LTR regions. In some embodiments, the terminal repeat regions include one or more LTR regions (e.g., one or more U5, R, and/or U3 regions) from an LTR-RE and/or an ERV.

[0148] In some embodiments, a terminal region of a gene delivery construct comprises one or more long terminal repeat (LTR) regions (e.g., from an LTR-RE or an ERV). In some embodiments, the terminal repeat region comprises one or more of a U3, R, and/or U5 regions. For example, in some embodiments a terminal repeat region comprises a U3 region, an R region, a U5 region, a U3 and an R region, an R and a U5 region, or a U3 and an R and a U5 region (e.g., a complete LTR from an LTR-RE or an ERV).

[0149] Accordingly, in some embodiments, the first and second terminal regions of a gene delivery construct have identical sequences (e.g., both having a U3-R-U5 configuration). In some embodiments, the first and second terminal regions are approximately 200-1,500 nucleotides long (e.g., 250-1,400 nucleotides long). In some embodiments, the terminal regions of a gene delivery construct are selected from natural LTR-RE or ERV terminal repeat regions.

[0150] In some embodiments, the terminal regions are selected from LTR-RE regions found in plants, fungi, insects, and vertebrates, and/or ERV regions (e.g., found in eukaryotes, for example in vertebrates, for example in mammals, for example in humans). Non-limiting examples of LTR-REs and/or ERVs from which terminal regions can be used include Copia, Gypsy, Bel, and Dirs, ERV class I (ERV1), ERV class II (ERV2), EVR class III (ERV3), retroviral-like Intracisternal A Particle (IAP), MusD/Early Transposon (ETn), and ERV mammalian apparent LRT-RE (ERV MaLR). ERV1 regions include gammaretroviral and epsilon retroviral regions. ERV2 regions include betaretroviral regions. ERV3 regions include spumaretroviral regions. In some embodiments, regions from ERVs such as errant-like or errantiviruses can be used. In some embodiments, regions from a human ERV (HERV) can be used.

### Gene Delivery Compositions

[0151] In some embodiments, a gene delivery construct (e.g., a DNA and/or RNA molecule) is provided along with (either in cis or in trans) a second nucleic acid that encodes an engineered protein and/or with the engineered protein itself. In some embodiments, the second nucleic acid that encodes the engineered protein can include one or more sequences that encode one or more other proteins (e.g., one or more other LTR or non-LTR retroelement proteins). In some embodiments, the one or more other proteins include a GAG, PRO, and/or ENV protein of an LTR element.

[0152] The nucleic acids provided in the cis or trans configurations can be DNA or RNA molecules as described in more detail in this application. In some embodiments, nucleic acids provided in a trans configuration can be DNA, RNA, or a combination of DNA and RNA molecules. For example, the gene delivery construct comprising the transgene (e.g., gene of interest) can be provided as a DNA molecule along with a second nucleic acid that is an RNA molecule (e.g., encoding an engineered protein). However, in some embodiments, the gene delivery construct comprising the transgene (e.g., gene of interest) can be provided as an RNA molecule along with a second nucleic acid that is a DNA molecule (e.g., encoding an engineered protein).

[0153] The nucleic acids described in this application (e.g., the gene delivery construct and/or a nucleic acid that encodes one or more proteins that promote genomic integration of the transgene) also can include different regulatory sequences that act as promoters, transcriptional regulators, polyadenylation signals, translational sequences (e.g., ribosome binding sites, etc.).

[0154] In some embodiments, such regulatory sequences can be the regulatory sequences that are naturally associated with the genes and/or terminal regions. However, in some embodiments, one or more heterologous regulatory sequences can be added or substituted for the natural sequences, e.g., to provide different levels and/or patterns of expression (for example, higher expression levels than the natural sequences, lower expression levels than the natural sequences, inducible expression, tissue-specific expression, or other patterns of expression). In some embodiments, one or more of the regulatory sequences (e.g., promoters) are constitutive, inducible, and/or tissue specific.

[0155] Accordingly, in some embodiments, a gene delivery construct and/or a nucleic acid that encodes an engineered protein comprises one or more naturally occurring promoters, polyadenylation signal sequences, and/or other regulatory sequences. In some embodiments, the naturally occurring promoters, polyadenylation signal sequences, and/or other regulatory sequences can be heterologous sequences (e.g., a CMV promoter, EFIa promoter, MNDU promoter, SFFV promoter, and/or an SV40 polyadenylation sequence). Also, in some embodiments, one or more modified (e.g., having a sequence that differs from a wild-type sequence) promoter, polyadenylation signal sequence, and/or other regulatory sequences are used. In some embodiments, a sequence alteration changes the activity (e.g., increases or decreases the effectiveness, changes the cell or tissue specificity, or otherwise changes the activity) of one or more of these sequences.

[0156] In some embodiments, one or more of the naturally occurring promoter and/or transcription regulatory and/or transcription enhancer elements within a terminal region are deleted and/or mutated to increase or decrease transcription from the terminal region. In some embodiments, a nucleic acid may include naturally occurring transcription elements (e.g., promoter, transcription regulatory, and/or transcription enhancer elements) within a terminal region of a gene delivery construct along with additional transcription elements located in a polynucleotide flanking the gene delivery construct (e.g., upstream from the first terminal region on a DNA molecule).

[0157] In some embodiments, a promoter that is located within a polynucleotide flanking a gene delivery construct is an inducible promoter. In some embodiments, a promoter that is located within a polynucleotide flanking a gene delivery construct is a tissue-specific promoter.

[0158] In some embodiments, a gene delivery construct comprises one or more sequences that are homologous to a target sequence (e.g., a target sequence in a host genome). Non-limiting examples of target sequences include safe harbor genomic targets. In some embodiments, a safe harbor genomic target is a AAVS1, a hROSA26, a CCR5, a SHS231, or a PCSK9 safe harbor.

[0159] Accordingly, in some embodiments, a gene delivery construct may include a 5′ terminal region (e.g., a 5′ UTR), a 3′ terminal region (e.g., a 3′ UTR), a polyA sequence, a sequence that is recognized by a retrotransposable element (e.g., a retroelement-derived polypeptide or domain thereof comprised in a driver) for binding, reverse transcription, and/or integration into a target nucleic acid (e.g., into a target genome), and a transgene (e.g., a sequence comprising a gene of interest). In some embodiments, a transgene comprises a promoter that is active (e.g., selectively active) in target cells of interest (e.g., an EF1a, CMV, A1AT, Albumin, or ApoE promoter), and a polyadenylation sequence in addition to a sequence encoding a protein of interest. In some embodiments, a gene delivery construct may comprise one or more RNA nuclear localization sequences (e.g., a SAFB motif) and/or one or more stabilization motifs (e.g., a WPRE motif). In some embodiments, a construct also may comprise flanking regions homologous to a target sequence in a genome.

[0160] In some embodiments, a gene delivery construct is provided along with a driver nucleic acid that provides an engineered protein that promotes integration of the gene delivery construct into a target nucleic acid (e.g., a genomic nucleic acid of a host cell). In some embodiments, the gene delivery construct and/or the driver nucleic acid encoding the engineered protein is an RNA molecule. In some embodiments, the gene delivery construct and/or the driver nucleic acid encoding the engineered protein is a DNA molecule (e.g., a single-stranded or a double-stranded DNA molecule). In some embodiments, the DNA and/or RNA molecules further comprise additional flanking nucleic acids. In some embodiments, the additional flanking nucleic acids are Adeno-associated viruses (AAV) or lentiviral nucleic acids. In some embodiments, the additional flanking nucleic acids are AAV inverted terminal repeats (ITRs).

[0161] In some embodiments, one or more nucleic acids (e.g., a gene delivery construct and a nucleic acid encoding one or more engineered proteins, for example in cis or in trans) and/or proteins described in this application are provided in a composition for delivery to a cell. In some embodiments, the cell is a mammalian cell. In some embodiments, one or more nucleic acids and/or proteins described in this application are provided in a composition for delivery to a subject. In some embodiments, the subject is a mammalian subject (e.g., a human subject).

[0162] In some embodiments, a composition comprises one or more nucleic acids and/or one or more proteins.

[0163] In some embodiments, the composition comprises a lipid nanoparticle (LNP). In some embodiments, the average size of an LNP is between 10 to 1000 nm in diameter. Any technique known in the art may be used to determine the size of the LNP. For example, LNP size could be measured using dynamic light scattering (DLS).

[0164] In some embodiments, the LNP is comprised of an ionizable lipid, a PEGylated lipid a phospholipid, a cholesterol, a sterol, a non-cationic lipid, or any combination thereof.

[0165] In some embodiments, a composition comprises one or more nucleic acids and an LNP.

[0166] In some embodiments, a composition comprises one or more proteins and an LNP. In some embodiments, a composition comprises one or more nucleic acids, one or more proteins, and an LNP.

[0167] In some embodiments, a composition further comprises a pharmaceutically acceptable carrier, adjuvant, diluent, or excipient.

[0168] In some embodiments, one or more nucleic acid(s) and/or proteins are provided in a composition for delivery to a cell, or to a subject. In some embodiments, the subject is a mammal. In some embodiments, the mammal is human.

[0169] Methods of administration include, but are not limited to intravenous, intraperitoneal, intramuscular, subcutaneous, intrathecal, and intradermal administration. In some embodiments, administration is via injection or intravenous infusion. In some embodiments, the injection is intramuscular, intraperitoneal, intravascular, or subcutaneous. In some embodiments, two or more compositions (e.g., different compositions, for example comprising different nucleic acids) can be administered together or simultaneously. In some embodiments, two or more compositions (e.g., different compositions, comprising different nucleic acids) can be administered separately (e.g., sequentially).

### EXEMPLARY EMBODIMENTS

[0170] The following embodiments are provided as exemplary.

### Set I

[0171] Embodiment I-1. A nucleic acid encoding an engineered protein comprising a retroelement-derived polypeptide fused to at least one heterologous polypeptide, wherein the heterologous polypeptide comprises an RNA/DNA processing polypeptide, an RNA/DNA repair polypeptide, a nucleic acid binding polypeptide, a nucleosome binding polypeptide, or any combination thereof.

[0172] Embodiment I-2. The nucleic acid of embodiment I-1, wherein the encoded retroelement-derived polypeptide comprises a reverse transcriptase domain, an endonuclease domain, an RNA binding domain, and/or an integrase domain.

[0173] Embodiment I-3. The nucleic acid of embodiment I-1 or I-2, encoding a heterologous polypeptide fused to the N-terminus of the retroelement-derived polypeptide.

[0174] Embodiment I-4. The nucleic acid of embodiment I-1 or I-2, encoding a heterologous polypeptide fused to the C-terminus of the retroelement-derived polypeptide.

[0175] Embodiment I-5. The nucleic acid of embodiment I-1 or I-2, encoding an N-terminal heterologous polypeptide fused to the N-terminus of the retroelement-derived polypeptide, and a C-terminal heterologous polypeptide fused to the C-terminus of the retroelement-derived polypeptide.

[0176] Embodiment I-6. The nucleic acid of any prior embodiment, wherein the at least one heterologous polypeptide is inserted within the retroelement-derived polypeptide.

[0177] Embodiment I-7. The nucleic acid of embodiment I-6, wherein the at least one heterologous polypeptide is fused a) at its N-terminus to a first domain of the retroelement-derived polypeptide and b) at its C-terminus to a second domain of the retroelement-derived polypeptide.

[0178] Embodiment I-8. The nucleic acid of any prior embodiment, wherein at least one heterologous polypeptide comprises an RNA/DNA processing polypeptide.

[0179] Embodiment I-9. The nucleic acid of embodiment I-8, wherein the RNA/DNA processing polypeptide is an RNase H polypeptide.

[0180] Embodiment I-10. The nucleic acid of any prior embodiment, wherein at least one heterologous polypeptide comprises an RNA/DNA repair polypeptide.

[0181] Embodiment I-11. The nucleic acid of embodiment I-10, wherein the RNA/DNA repair polypeptide is a Rad51 polypeptide, a CtlP polypeptide, a HSV-1 alkaline nuclease polypeptide, a BRCA2 polypeptide, a DSS1 polypeptide, a UL12 polypeptide, a Nanog polypeptide, a NBN polypeptide, a p53 inhibitor, an MDM2 polypeptide, or a Peptide 14 polypeptide.

[0182] Embodiment I-12. The nucleic acid of any prior embodiment, wherein at least one heterologous polypeptide comprises a nucleic acid binding polypeptide.

[0183] Embodiment I-13. The nucleic acid of embodiment I-12, wherein the nucleic acid binding polypeptide is a non-sequence specific DNA binding polypeptide.

[0184] Embodiment I-14. The nucleic acid of embodiment I-13, wherein the non-sequence specific DNA binding polypeptide is a Sto7d DNA binding domain or an Sso7d DNA binding domain.

[0185] Embodiment I-15. The nucleic acid of embodiment I-12, wherein the nucleic acid binding polypeptide is a sequence specific DNA binding polypeptide.

[0186] Embodiment I-16. The nucleic acid of embodiment I-15, wherein the sequence specific DNA binding polypeptide is a dead Cas nuclease, SpCas9 having D10A and/or H840A amino acid substitutions, a Zinc finger DNA binding domain, or a Transcription activator-like effector (TALE) DNA binding domain.

[0187] Embodiment I-17. The nucleic acid of any prior embodiment, wherein at least one heterologous polypeptide comprises a nucleosome binding polypeptide.

[0188] Embodiment I-18. The nucleic acid of embodiment I-17, wherein the nucleosome binding polypeptide is an HMGN1 polypeptide, a HMGB1 polypeptide, or an StkC DNA binding domain.

[0189] Embodiment I-19. The nucleic acid of any prior embodiment, wherein at least one heterologous polypeptide further comprises a localization signal.

[0190] Embodiment I-20. The nucleic acid of embodiment I-19, wherein the localization signal is a nuclear localization signal (NLS).

[0191] Embodiment I-21. The nucleic acid of embodiment I-20, wherein the NLS is an SV40 (e.g., PKKKRKV), nucleoplasmin (e.g., KRPAATKKAGQAKKKK), or bipartite SV40 (e.g., KRTADGSEFESPKKKRKV) sequence.

[0192] Embodiment I-22. The nucleic acid of embodiment I-19, wherein the localization signal is a nucleolar localization signal (NoLS).

[0193] Embodiment I-23. The nucleic acid of embodiment I-22, wherein the NoLS is a PNRC (e.g., PKKRRKKK), poly R (e.g., RRRRRRR), or H2B (e.g., KKRKRSRK) sequence.

[0194] Embodiment I-24. The nucleic acid of any prior embodiment, wherein at least one heterologous polypeptide comprises at least one linker.

[0195] Embodiment I-25. The nucleic acid of embodiment I-24, wherein the linker is at the C-terminus of an N-terminal heterologous polypeptide.

[0196] Embodiment I-26. The nucleic acid of embodiment I-24, wherein the linker is at the N-terminus of a C-terminal heterologous polypeptide.

[0197] Embodiment I-27. The nucleic acid of any one of embodiments I-24 to I-26, wherein the linker is a rigid linker.

[0198] Embodiment I-28. The nucleic acid of any one of embodiments I-24 to I-26, wherein the linker is a flexible linker.

[0199] Embodiment I-29. The nucleic acid of embodiment I-24, wherein the linker is a glycine-serine based linker or a XTEN peptide linker.

[0200] Embodiment I-30. The nucleic acid of any one of embodiments I-24 to I-29, wherein the linker is 2-35 amino acids long.

[0201] Embodiment I-31. The nucleic acid of any prior embodiment, wherein at least one heterologous polypeptide further comprises a viral infectivity factor (VIF).

[0202] Embodiment I-32. The nucleic acid of any prior embodiment, wherein the retroelement-derived polypeptide comprises a reverse transcriptase domain.

[0203] Embodiment I-33. The nucleic acid of embodiment I-32, wherein the reverse transcriptase domain is from an LTR retrotransposon.

[0204] Embodiment I-34. The nucleic acid of embodiment I-32, wherein the reverse transcriptase domain is from a non-LTR retrotransposon.

[0205] Embodiment I-35. The nucleic acid of embodiment I-32, wherein the reverse transcriptase domain is from a LINE-1, a LINE-2, or a LINE-3/CR-1 retrotransposon.

[0206] Embodiment I-36. The nucleic acid of embodiment I-32, wherein the reverse transcriptase domain is from a LINE 2-2 retrotransposon.

[0207] Embodiment I-37. The nucleic acid of embodiment I-36, wherein the LINE-2-2 retrotransposon is a zebrafish LINE 2-2 retrotransposon.

[0208] Embodiment I-38. The nucleic acid of embodiment I-32, wherein the reverse transcriptase domain is from murine leukemia virus.

[0209] Embodiment I-39. The nucleic acid of embodiment I-32, wherein the retroelement-derived polypeptide further comprises an endonuclease domain.

[0210] Embodiment I-40. The nucleic acid of any prior embodiment, wherein the retroelement-derived polypeptide is a POL protein of an LTR retroelement, or an ORF protein of a non-LTR retroelement.

[0211] Embodiment I-41. The nucleic acid of embodiment I-40, wherein the retroelement-derived polypeptide is a ZFL2-2 protein.

[0212] Embodiment I-42. The nucleic acid of any prior embodiment, encoding at least one heterologous polypeptide that comprises a heterologous endonuclease domain.

[0213] Embodiment I-43. The nucleic acid of embodiment I-42, wherein the heterologous endonuclease domain is a Cas9 nuclease, a Cas9 nickase, a SpCas9 with H840A mutation, a homing endonuclease, or a FokI nuclease.

[0214] Embodiment I-44. The nucleic acid of any prior embodiment, wherein the nucleic acid encodes an amino acid sequence that is at least 80% identical to any of SEQ ID NOs: 1-22, 27, 29, 31, 33, 35, 37, 39, 41, 43, 45, 47, or 49.

[0215] Embodiment I-45. The nucleic acid of any prior embodiment, wherein the nucleic acid encodes an amino acid sequence that is at least 85% identical to any of SEQ ID NOs: 1-22, 27, 29, 31, 33, 35, 37, 39, 41, 43, 45, 47, or 49.

[0216] Embodiment I-46. The nucleic acid of any prior embodiment, wherein the nucleic acid encodes an amino acid sequence that is at least 90% identical to any of SEQ ID NOs: 1-22, 27, 29, 31, 33, 35, 37, 39, 41, 43, 45, 47, or 49.

[0217] Embodiment I-47. The nucleic acid of any prior embodiment, wherein the nucleic acid encodes an amino acid sequence that is at least 95% identical to any of SEQ ID NOs: 1-22, 27, 29, 31, 33, 35, 37, 39, 41, 43, 45, 47, or 49.

[0218] Embodiment I-48. The nucleic acid of any prior embodiment, wherein the nucleic acid encodes an amino acid sequence that is at least 99% identical to any of SEQ ID NOs: 1-22, 27, 29, 31, 33, 35, 37, 39, 41, 43, 45, 47, or 49.

[0219] Embodiment I-49. The nucleic acid of any prior embodiment, wherein the reverse transcriptase fusion protein consists of a polypeptide having an amino acid sequence of any of SEQ ID NOs: 1-22, 27, 29, 31, 33, 35, 37, 39, 41, 43, 45, 47, or 49.

[0220] Embodiment I-50. The nucleic acid of any prior embodiment, encoding a retroelement-derived reverse transcriptase domain having at least one amino acid substitution that stabilizes the reverse transcriptase domain and/or its association with RNA and/or DNA relative to an unsubstituted reverse transcriptase domain.

[0221] Embodiment I-51. The nucleic acid of any prior embodiment, encoding a retroelement-derived endonuclease domain comprising at least one amino acid substitution that promotes its association with DNA relative to an unsubstituted endonuclease domain.

[0222] Embodiment I-52. A nucleic acid encoding an engineered protein comprising a retroelement-derived reverse transcriptase domain having at least one amino acid substitution that stabilizes the reverse transcriptase domain and/or its association with RNA and/or DNA relative to an unsubstituted reverse transcriptase domain.

[0223] Embodiment I-53. The nucleic acid of embodiment I-52, wherein the reverse transcriptase domain is an amino acid variant of a reverse transcriptase domain of an LTR retrotransposon.

[0224] Embodiment I-54. The nucleic acid of embodiment I-52, wherein the reverse transcriptase domain is an amino acid variant of a reverse transcriptase domain of a non-LTR retrotransposon.

[0225] Embodiment I-55. The nucleic acid of embodiment I-54, wherein non-LTR retrotransposon is a LINE-1, LINE-2, or a LINE-3/CR-1 retrotransposon.

[0226] Embodiment I-56. The nucleic acid of embodiment I-54, wherein non-LTR retrotransposon is a LINE 2-2 retrotransposon.

[0227] Embodiment I-57. The nucleic acid of embodiment I-56, wherein the LINE-2-2 retrotransposon is a zebrafish LINE 2-2 retrotransposon.

[0228] Embodiment I-58. The nucleic acid of any one of embodiments I-52 to I-57, wherein the at least one amino acid substitution stabilizes the reverse transcriptase domain relative to an unsubstituted reverse transcriptase domain.

[0229] Embodiment I-59. The nucleic acid of embodiment I-58, wherein the at least one amino acid substitution a) improves packing of hydrophobic residues in the core of the reverse transcriptase domain, b) stabilizes a loop region of the reverse transcriptase domain, c) alters electrostatic or H-bond stability within the reverse transcriptase domain, d) reduces the size of the active site of the reverse transcriptase domain relative to an unsubstituted reverse transcriptase domain, and/or e) increases the size of an amino acid side chain in the active site of the reverse transcriptase domain relative to an unsubstituted reverse transcriptase domain.

[0230] Embodiment I-60. The nucleic acid of embodiment I-58, wherein
[0231] a) the at least one amino acid substitution that stabilizes a loop region is a proline substitution and/or addition,
[0232] b) the at least one amino acid substitution that alters electrostatic or H-bond stability substitutes a charge or H-bond acceptor/donor preference, or
[0233] c) the at least one amino acid substitution that reduces the size of the active site and/or increases the size of an amino acid side chain in the active site of the reverse transcriptase domain comprises at least one amino substitution corresponding to a substitution selected from the group consisting of: A688V, A688I relative to SEQ ID NO: 51.

[0234] Embodiment I-61. The nucleic acid of embodiment I-60, wherein the amino acid substitution that substitutes a charge or H-bond acceptor/donor preference
[0235] a) substitutes a non-charged amino acid (e.g., alanine) with a positively charged amino acid (e.g., arginine or lysine) or a hydrogen bond donor (e.g., histidine),
[0236] b) substitutes a hydrogen bond donor (e.g., asparagine) with a charged amino acid (e.g., lysine), or
[0237] c) substitutes a negatively charged amino acid (e.g., aspartate) with a non-charged amino acid (e.g., proline).

[0238] Embodiment I-62. The nucleic acid of any one of embodiments I-58 to I-61, wherein the reverse transcriptase domain comprises at least one amino substitution corresponding to a substitution selected from the group consisting of:
[0239] a) I625L, H521P, S737P, P705A, M558L, M733L, M760S, M750L, A757P, H717A, H717K, D497S, I625H, L825G, D278S, L837I, A464P, K762R, A948T, P675S, H698P, L742P, E541K, Q547R, S814P, S672P, N560P, H853P, L514P, L524P, Q449P, H650P, G674P, S800P, I896P, S474P, and D520P, relative to SEQ ID NO: 51, and
[0240] b) N647K, H717K, I625H, and D520P, relative to SEQ ID NO: 51.

[0241] Embodiment I-63. The nucleic acid of any one of embodiments I-52 to I-57, wherein the at least one amino acid substitution
[0242] a) stabilizes the association of the reverse transcriptase domain with RNA and/or DNA relative to an unsubstituted reverse transcriptase domain.
[0243] b) stabilizes the association of the RNA binding domain of the reverse transcriptase with its cognate RNA relative to an unsubstituted RNA binding domain.

[0244] Embodiment I-64. The nucleic acid of embodiment I-63, wherein the at least one amino substitution a) adds a positive charge, b) removes a negative charge, or c) alters at least one H-bond forming residue.

[0245] Embodiment I-65. The nucleic acid of embodiment I-63 or I-64, wherein the reverse transcriptase domain comprises at least one amino substitution corresponding to a substitution selected from the group consisting of:
[0246] a) D550T, D770H, K815R, S883R, K952R, K542R, N546R, H569R, S577R, H463K, Q478K, K566R, K815R, and S960R, relative to SEQ ID NO: 51, and
[0247] b) I343K, L354N, Q357K, and E366N, relative to SEQ ID NO: 51.

[0248] Embodiment I-66. A nucleic acid encoding an engineered protein comprising a retroelement-derived endonuclease domain comprising at least one amino acid substitution that promotes its association with DNA relative to an unsubstituted endonuclease domain.

[0249] Embodiment I-67. The nucleic acid of embodiment I-66, wherein the endonuclease domain comprises at least one amino acid substitution corresponding to a substitution selected from the group consisting of: Y139K, and D64K relative to SEQ ID NO: 51.

[0250] Embodiment I-68. The nucleic acid of any prior embodiment, wherein the nucleic acid is an RNA molecule.

[0251] Embodiment I-69. The nucleic acid of any prior embodiment, wherein the nucleic acid is a DNA molecule.

[0252] Embodiment I-70. The nucleic acid of embodiment I-69, wherein the nucleic acid comprises a T7 promoter.

[0253] Embodiment I-71. The nucleic acid of any of embodiments I-1 to I-69, wherein the nucleic acid comprises a heterologous promoter.

[0254] Embodiment I-72. The nucleic acid of embodiment I-71, wherein the promoter is a constitutive promoter.

[0255] Embodiment I-73. The nucleic acid of embodiment I-71, wherein the promoter is an inducible promoter.

[0256] Embodiment I-74. The nucleic acid of embodiment I-71, wherein the promoter is a tissue specific promoter.

[0257] Embodiment I-75. The nucleic acid of embodiment I-71, wherein the promoter is selected from the group consisting of an EF1a promoter, a CMV promoter, an A1AT promoter, an Albumin gene promoter, an MNDU promoter, an SFFV promoter, and an ApoE promoter.

[0258] Embodiment I-76. The nucleic acid of any prior embodiment, wherein the nucleic acid comprises one or more chemical or sequence modifications.

[0259] Embodiment I-77. The nucleic acid of embodiment I-76, wherein the one or more chemical or sequence modifications are selected from the group consisting of an RNA CAP, a modified polyA length, a chemical modification (e.g., a pseudouridine and/or a methylpseudouridine), a 5′ UTR modification, a 3′ UTR modification, a modified Kozak sequence, a modified (e.g., truncated) stem loop, an RNA stabilization motif, a 5-methoxyuridine (5-MO-U) modification, a 5-methylcytidine (5mC) modification, and one or more additional and/or modified microsatellites.

[0260] Embodiment I-78. The nucleic acid of any prior embodiment comprising a codon optimized sequence.

[0261] Embodiment I-79. The nucleic acid of embodiment I-78, wherein the codon optimized sequence is optimized for expression in human cells.

[0262] Embodiment I-80. The nucleic acid of embodiment I-78, wherein the codon optimized sequence has a reduced Uracil (U) load relative to a corresponding naturally occurring sequence.

[0263] Embodiment I-81. The nucleic acid of embodiment I-77, wherein the RNA stabilization motif is a WPRE motif.

[0264] Embodiment I-82. An engineered protein encoded by any one of the nucleic acids of any one of embodiments I-1 to I-81.

[0265] Embodiment I-83. A composition comprising:
[0266] a) a first nucleic acid of any one of embodiments I-1 to I-81; and
[0267] b) a second nucleic acid comprising a polynucleotide encoding a gene of interest.

[0268] Embodiment I-84. The composition of embodiment I-83, wherein the first and second nucleic acids are separate DNA molecules.

[0269] Embodiment I-85. The composition of embodiment I-83, wherein the first and second nucleic acids are separate RNA molecules.

[0270] Embodiment I-86. The composition of embodiment I-83, wherein the one of the first and second nucleic acids is a DNA molecule and one of the first and second nucleic acids is an RNA molecule.

[0271] Embodiment I-87. The composition of any one of embodiments I-83 to I-86, wherein the first polynucleotide is operably linked to a first heterologous promoter.

[0272] Embodiment I-88. The composition of any one of embodiments I-83 to I-87, wherein the second polynucleotide is operably linked to a second heterologous promoter.

[0273] Embodiment I-89. The composition of embodiment I-87 or I-88, wherein at least one of the first and second heterologous promoters is a constitutive promoter.

[0274] Embodiment I-90. The composition of embodiment I-87 or I-88, wherein at least one of the first and second heterologous promoters is an inducible promoter.

[0275] Embodiment I-91. The composition of embodiment I-87 or I-88, wherein at least one of the first and second heterologous promoters is a constitutive promoter.

[0276] Embodiment I-92. The composition of embodiment I-87 or I-88, wherein the first and second heterologous promoters are independently an EF1a promoter, a CMV promoter, an A1AT promoter, an Albumin gene promoter, MNDU promoter, SFFV promoter, or an ApoE promoter.

[0277] Embodiment I-93. The composition of any one of embodiments I-83 to I-92, wherein one or both of the first and second nucleic acids further comprise one or more of the following modifications: an RNA CAP, a modified polyA length, a chemical modification (e.g., a pseudouridine and/or a methylpseudouridine), a 5′ UTR modification, a 3′ UTR modification, a modified Kozak sequence, a modified (e.g., truncated) stem loop, an RNA stabilization motif, a 5-methoxyuridine (5-MO-U) modification, a 5-methylcytidine (5mC) modification, or one or more additional and/or modified microsatellites.

[0278] Embodiment I-94. The composition of any one of embodiments I-83 to I-93, wherein one or both of the first and second nucleic acids comprises a codon optimized sequence.

[0279] Embodiment I-95. The composition of embodiment I-94, wherein the codon optimized sequence is optimized for expression in human cells.

[0280] Embodiment I-96. The composition of embodiment I-94, wherein the codon optimized sequence has a reduced Uracil (U) load relative to a corresponding naturally occurring sequence.

[0281] Embodiment I-97. The composition of embodiment I-93, wherein the RNA stabilization motif is a WPRE motif.

[0282] Embodiment I-98. The composition of any one of embodiments I-83 to I-97, wherein one or both of the first and second nucleic acids further comprise an RNA nuclear localization sequence.

[0283] Embodiment I-99. The composition of embodiment I-98, wherein the RNA nuclear localization sequence is an SAFB motif.

[0284] Embodiment I-100. The composition of any one of embodiments I-83 to I-99, wherein the second polynucleotide is flanked by a first terminal region and a second terminal region.

[0285] Embodiment I-101. The composition of embodiment I-100, wherein the first and second terminal regions are LTRs.

[0286] Embodiment I-102. The composition of embodiment I-100, wherein the first terminal region is the 5′ UTR of a LINE, and the second terminal region is the 3′ UTR of a LINE.

[0287] Embodiment I-103. The composition of embodiment I-102, wherein the LINE 3′UTR region comprises a truncated stem loop relative to a wild-type stem loop.

[0288] Embodiment I-104. The composition of any one of embodiments I-83 to I-103, wherein the second nucleic acid further comprises a 5′ UTR, a 3′UTR, a polyA sequence, a sequence that is recognized, by the engineered protein encoded by the first nucleic acid, for binding, reverse transcription, and integration of the gene of interest into a target nucleic acid.

[0289] Embodiment I-105. The composition of embodiment I-104, wherein the target nucleic acid is a genome of a target cell.

[0290] Embodiment I-106. The composition of any one of embodiments I-83 to I-105, wherein the second nucleic acid comprises i) a promoter operably linked to the second polynucleotide encoding the gene of interest, and ii) a polyadenylation sequence, and wherein the promoter is selectively active in one or more target cell types.

[0291] Embodiment I-107. The composition of any one of embodiments I-83 to I-106, wherein the gene of interest encodes a therapeutic RNA and/or a therapeutic protein.

[0292] Embodiment I-108. The composition of embodiment I-107, wherein the therapeutic RNA is an antisense RNA (asRNA), small interfering RNA (siRNA), microRNA (miRNA), or RNA aptamer.

[0293] Embodiment I-109. The composition of embodiment I-107, wherein the therapeutic protein is an antibody, regulatory protein, hormone, cytokine, structural protein, enzyme, or membrane protein.

[0294] Embodiment I-110. The composition of embodiment I-107, wherein the therapeutic protein is Factor VIII, Factor IX, Phenylalanine hydroxylase, ATP7B, alpha glucosidase, argininosuccinate synthetase, galactose-1-phosphate uridyltransferase, or ornithine transcarbamylase.

[0295] Embodiment I-111. The composition of any one of embodiments I-83 to I-110, wherein the second nucleic acid comprises flanking regions homologous to target sites in a genome of a target cell.

[0296] Embodiment I-112. The composition of any one of embodiments I-83 to I-111, wherein the first and second nucleic acids are comprised within a plurality of LNP particles.

[0297] Embodiment I-113. A method comprising administering a nucleic acid of any one of embodiments I-1 to I-81, a composition of any one of embodiments I-83 to I-112, or an engineered protein embodiment I-82 to a subject.

[0298] Embodiment I-114. The method of embodiment I-113, wherein the subject is a human.

### Set II

[0299] Embodiment II-1. A nucleic acid encoding an engineered protein comprising a retroelement-derived polypeptide and at least one heterologous polypeptide; wherein the retroelement-derived polypeptide is derived from a non-long terminal repeat (non-LTR) retrotransposon; wherein the at least one heterologous polypeptide comprises an RNA/DNA processing polypeptide or domain thereof, an RNA/DNA repair polypeptide or domain thereof, a nucleic acid binding polypeptide or domain thereof, or a nucleosome binding polypeptide or domain thereof; and wherein the engineered protein exhibits at least one improved integration characteristic, as compared to a retroelement-derived polypeptide not fused to the at least one heterologous polypeptide.

[0300] Embodiment II-2. The nucleic acid of embodiment II-1, wherein the at least one improved integration characteristic is one or more of improved efficiency of integration, accuracy of integration, fidelity of integration, and processivity of integration.

[0301] Embodiment II-3. The nucleic acid of any one of embodiments II-1 to II-2, wherein the at least one heterologous polypeptide is capable of one or more of: promoting homology directed repair, promoting chromatin binding, promoting chromatin accessibility, promoting DNA binding, and promoting RNA binding.

[0302] Embodiment II-4. The nucleic acid of any one of embodiments II-1 to II-3, wherein the at least one heterologous polypeptide comprises an RNA/DNA processing polypeptide or domain thereof.

[0303] Embodiment II-5. The nucleic acid of embodiment II-4, wherein the at least one heterologous polypeptide comprising an RNA/DNA processing polypeptide or domain thereof is capable of: RNAseH activity, DNA polymerase activity, inhibiting ApoBec3 deaminase, and/or strand invasion of single-stranded DNA.

[0304] Embodiment II-6. The nucleic acid of embodiment II-4, wherein the RNA/DNA processing polypeptide is a Rad51 polypeptide, an RNAseH domain, a DNA polymerase.

[0305] Embodiment II-7. The nucleic acid of embodiment II-6, wherein the RNA/DNA processing polypeptide is a Rad51 polypeptide having an amino acid sequence that is at least 70% identical to the sequence as set forth in SEQ ID NO: 311.

[0306] Embodiment II-8. The nucleic acid of any one of embodiments II-1 to II-7, wherein the at least one heterologous polypeptide comprises an RNA/DNA repair polypeptide or domain thereof.

[0307] Embodiment II-9. The nucleic acid of embodiment II-8, wherein the at least one heterologous polypeptide comprising an RNA/DNA repair polypeptide or domain thereof is capable of: recruiting proteins involved in homologous recombination, recruiting DNA damage/signaling/repair factors, recruiting PCNA, inhibiting p53, and/or inhibiting 53BP1.

[0308] Embodiment II-10. The nucleic acid of embodiment II-8, wherein the RNA/DNA repair polypeptide is a CtIP-derived polypeptide, a RecT-derived polypeptide, an HSV-1 alkaline nuclease-derived polypeptide, a BRCA2-derived polypeptide, a DSS1-derived polypeptide, a nanog-derived polypeptide, an NBN-derived polypeptide, a RAD17-derived polypeptide, an ANKRD28-derived polypeptide, a PCNA interaction motif polypeptide, a MDC1-derived polypeptide, a MSH4-derived polypeptide, a SCML1-derived polypeptide, a CDKN2A-derived polypeptide, a 53BP1 inhibitor, or a p53 inhibitor.

[0309] Embodiment II-11. The nucleic acid of embodiment II-10, wherein the RNA/DNA repair polypeptide is a Rad17 polypeptide having an amino acid sequence that is at least 70% identical to the sequence as set forth in SEQ ID NO: 386.

[0310] Embodiment II-12. The nucleic acid of embodiment II-10, wherein the RNA/DNA repair polypeptide is an ANKRD28 polypeptide having an amino acid sequence that is at least 70% identical to the sequence as set forth in SEQ ID NO: 396

[0311] Embodiment II-13. The nucleic acid of embodiment II-10, wherein the RNA/DNA repair polypeptide is an HSV-1 alkaline nuclease (UL12) polypeptide having an amino acid sequence that is at least 70% identical to the sequence as set forth in SEQ ID NO: 25.

[0312] Embodiment II-14. The nucleic acid of embodiment II-10, wherein the RNA/DNA repair polypeptide is a BRCA2-derived polypeptide having an amino acid sequence that is at least 70% identical to the sequence as set forth in SEQ ID NO: 308.

[0313] Embodiment II-15. The nucleic acid of embodiment II-10, wherein the RNA/DNA repair polypeptide is a PCNA interaction motif having an amino acid sequence that is at least 70% identical to the sequence as set forth in any one of SEQ ID NOS: 250, 251, 391, 394, and 395.

[0314] Embodiment II-16. The nucleic acid of embodiment II-10, wherein the RNA/DNA repair polypeptide is a MDC1 polypeptide having an amino acid sequence that is at least 70% identical to the sequence as set forth in SEQ ID NO: 388.

[0315] Embodiment II-17. The nucleic acid of embodiment II-10, wherein the RNA/DNA repair polypeptide is a MSH4 polypeptide having an amino acid sequence that is at least 70% identical to the sequence as set forth in SEQ ID NO: 392.

[0316] Embodiment II-18. The nucleic acid of embodiment II-10, wherein the RNA/DNA repair polypeptide is a SCML1 polypeptide having an amino acid sequence that is at least 70% identical to the sequence as set forth in SEQ ID NO: 387.

[0317] Embodiment II-19. The nucleic acid of embodiment II-10, wherein the RNA/DNA repair polypeptide is a CDKN2A polypeptide having an amino acid sequence that is at least 70% identical to the sequence as set forth in SEQ ID NO: 389.

[0318] Embodiment II-20. The nucleic acid of embodiment II-10, wherein the RNA/DNA repair polypeptide is a p53 inhibitor.

[0319] Embodiment II-21. The nucleic acid of embodiment II-20, wherein the p53 inhibitor is a MDM2-derived peptide having an amino acid sequence that is at least 70% identical to the sequence as set forth in SEQ ID NO: 313, or a peptide 14-derived peptide having an amino acid sequence that is at least 70% identical to the sequence as set forth in SEQ ID NO: 314.

[0320] Embodiment II-22. The nucleic acid of any one of embodiments II-1 to II-21, wherein the at least one heterologous polypeptide comprises a nucleic acid binding polypeptide or domain thereof.

[0321] Embodiment II-23. The nucleic acid of embodiment II-22, wherein the nucleic acid binding polypeptide comprises a non-sequence specific DNA binding polypeptide or domain thereof.

[0322] Embodiment II-24. The nucleic acid of embodiment II-23, wherein the non-sequence specific DNA binding polypeptide comprises a Sto7d DNA binding domain having an amino acid sequence that is at least 70% identical to the sequence as set forth in SEQ ID NO: 26, or an Sso7d DNA binding domain having an amino acid sequence that is at least 70% identical to the sequence as set forth in SEQ ID NO: 377.

[0323] Embodiment II-25. The nucleic acid of embodiment II-22, wherein the nucleic acid binding polypeptide comprises a sequence specific DNA binding polypeptide or domain thereof.

[0324] Embodiment II-26. The nucleic acid of embodiment II-25, wherein the sequence specific DNA binding polypeptide is a Cas9 nuclease, dead Cas nuclease, SpCas9 having D10A and/or H840A amino acid substitutions, a Zinc finger DNA binding domain, or a transcription activator-like effector (TALE) DNA binding domain, having an amino acid sequence that is at least 70% identical to the sequence as set forth in any one of SEQ ID NOS: 259, 330, 318, 333, 400, and 401.

[0325] Embodiment II-27. The nucleic acid of any one of embodiments II-1 to II-26, wherein at least one heterologous polypeptide comprises a nucleosome binding polypeptide or domain thereof.

[0326] Embodiment II-28. The nucleic acid of embodiment II-27, wherein the nucleosome binding polypeptide comprises an HMGN1 polypeptide having an amino acid sequence that is at least 70% identical to the sequence as set forth in SEQ ID NO:23.

[0327] Embodiment II-29. The nucleic acid of embodiment II-27, wherein the nucleosome binding polypeptide comprises an HMGB1 polypeptide having an amino acid sequence that is at least 70% identical to the sequence as set forth in SEQ ID NO:24.

[0328] Embodiment II-30. The nucleic acid of embodiment II-27, wherein the nucleosome binding polypeptide comprises an StkC DNA binding domain having an amino acid sequence that is at least 70% identical to the sequence as set forth in SEQ ID NO:402.

[0329] Embodiment II-31. The nucleic acid of any one of embodiments II-1 to II-30, wherein the engineered protein comprises the at least one heterologous polypeptide fused to the N-terminus of the retroelement-derived polypeptide, to the C-terminus of the retroelement-derived polypeptide and/or internally within the retroelement-derived polypeptide.

[0330] Embodiment II-32. The nucleic acid of embodiment II-31, wherein the engineered protein comprises the at least one heterologous polypeptide fused to the C-terminus of the retroelement-derived polypeptide.

[0331] Embodiment II-33. The nucleic acid of embodiment II-31 or II-32, wherein the engineered protein comprises the at least one heterologous polypeptide fused to the N-terminus of the retroelement-derived polypeptide.

[0332] Embodiment II-34. The nucleic acid of any one of embodiments II-31 to II-33, wherein the engineered protein comprises the at least one heterologous polypeptide fused internally within the retroelement-derived polypeptide.

[0333] Embodiment II-35. The nucleic acid of any one of embodiments II-31 to II-34, wherein the engineered protein comprises a first heterologous polypeptide fused to the N-terminus of the retroelement-derived polypeptide and a second heterologous polypeptide fused to the C-terminus of the retroelement-derived polypeptide.

[0334] Embodiment II-36. The nucleic acid of any one of embodiments II-1 to II-35, wherein engineered protein comprises a plurality of heterologous polypeptides.

[0335] Embodiment II-37. The nucleic acid of any one of embodiment II-1 to II-36 wherein engineered protein comprises at least one localization signal.

[0336] Embodiment II-38. The nucleic acid of embodiment II-37, wherein the at least one localization signal is a nuclear localization signal (NLS).

[0337] Embodiment II-39. The nucleic acid of embodiment II-38, wherein the NLS comprises an amino acid sequence that is at least 80% identical, at least 90% identical, or 100% identical to a sequence as set forth in any one of SEQ ID NOs:54-56, 58, 59, 382, 384, or 390.

[0338] Embodiment II-40. The nucleic acid of embodiment II-37, wherein the at least one localization signal is a nucleolar localization signal (NoLS).

[0339] Embodiment II-41. The nucleic acid of embodiment II-40, wherein the NoLS. comprises an amino acid sequence that is at least 80% identical, at least 90% identical, or 100% identical to a sequence as set forth in SEQ ID NO:57.

[0340] Embodiment II-42. The nucleic acid of any one of embodiments II-1 to II-41, wherein the engineered protein comprises at least one linker.

[0341] Embodiment II-43. The nucleic acid of embodiment II-42, wherein the linker is at the C-terminus of a heterologous polypeptide located at the N-terminus of the engineered protein.

[0342] Embodiment II-44. The nucleic acid of embodiment II-42, wherein the linker is at the N-terminus of a heterologous polypeptide located at the C-terminus of the engineered protein.

[0343] Embodiment II-45. The nucleic acid of any one of embodiments II-42 to II-44, wherein the linker is a rigid linker.

[0344] Embodiment II-46. The nucleic acid of any one of embodiments II-42 to II-44, wherein the linker is a flexible linker.

[0345] Embodiment II-47. The nucleic acid of embodiment II-42, wherein the linker is a glycine-serine based linker.

[0346] Embodiment II-48. The nucleic acid of embodiment II-42, wherein the linker isa XTEN peptide linker.

[0347] Embodiment II-49. The nucleic acid of any one of embodiments II-42 to II-47, wherein the linker is 2-35 amino acids long.

[0348] Embodiment II-50. The nucleic acid of any one of embodiments II-42 to II-49, wherein the linker is selected from any one of SEQ ID NOs:334-340.

[0349] Embodiment II-51. The nucleic acid of any one of embodiments II-1 to II-49, wherein the engineered protein comprises a viral infectivity factor (VIF), optionally wherein the VIF is selected from any one of SEQ ID NOs:378-380.

[0350] Embodiment II-52. The nucleic acid of any one of embodiments II-1 to II-51, wherein the non-LTR retrotransposon is an apurinic/apyrimidinic endonucleases (APE)-type retrotransposon.

[0351] Embodiment II-53. The nucleic acid of embodiment II-52, wherein the APE-type retrotransposon is a ZFL2-2 retrotransposon, a Vingi-1_Acar retrotransposon, a Vingi-2_Acar retrotransposon, a L2-18_Acar retrotransposon, or a CR1-1_Acar retrotransposon.

[0352] Embodiment II-54. The nucleic acid of any one of embodiments II-1 to II-53, wherein the retroelement-derived polypeptide is a wild type retroelement-derived polypeptide, or at least one domain thereof.

[0353] Embodiment II-55. The nucleic acid of any one of embodiments II-1 to II-53, wherein the retroelement-derived polypeptide is a retroelement-derived polypeptide variant comprising an amino acid substitution, an amino acid deletion, an amino acid truncation, or a combination thereof, when compared to a wild type retroelement-derived polypeptide.

[0354] Embodiment II-56. The nucleic acid of any one of embodiments II-1 to II-55, wherein the retroelement-derived polypeptide comprises a reverse transcriptase domain, an endonuclease domain, integrase domain, and/or an RNA binding domain.

[0355] Embodiment II-57. The nucleic acid of embodiment II-56, wherein the retroelement-derived polypeptide comprises a reverse transcriptase domain.

[0356] Embodiment II-58. The nucleic acid of embodiment II-57, wherein the reverse transcriptase domain is from an APE-type retrotransposon.

[0357] Embodiment II-59. The nucleic acid of embodiment II-57, wherein the reverse transcriptase domain is from a CRE, R4, Hero, NeSL, R2, RandI, Proto1, L1, Tx1, RTEPT, Proto2, RTEX, RTE, Outcast, Ingi, I, Nimb, Tad1, Loa, R1, Jockey, Rex1, CR1, L2, L2A, L2B, Daphne, or Crack retrotransposon.

[0358] Embodiment II-60. The nucleic acid of embodiment II-57, wherein the reverse transcriptase domain is from a LINE 2-2 retrotransposon.

[0359] Embodiment II-61. The nucleic acid of embodiment II-60, wherein the LINE-2-2 retrotransposon is a zebrafish LINE 2-2 retrotransposon.

[0360] Embodiment II-62. The nucleic acid of embodiment II-57, wherein the reverse transcriptase domain is from murine leukemia virus.

[0361] Embodiment II-63. The nucleic acid of embodiment II-57, wherein the retroelement-derived polypeptide further comprises an endonuclease domain.

[0362] Embodiment II-64. The nucleic acid of any one of embodiments II-1 to II-63, wherein the retroelement-derived polypeptide is an ORF protein of a non-LTR retrotransposon.

[0363] Embodiment II-65. The nucleic acid of embodiment II-64, wherein the retroelement-derived polypeptide is a ZFL2-2 protein.

[0364] Embodiment II-66. The nucleic acid of embodiment II-64, wherein the retroelement-derived polypeptide is a Vingi-1 protein.

[0365] Embodiment II-67. The nucleic acid of embodiment II-1, wherein the heterologous endonuclease domain comprises a Cas9 nuclease having an amino acid sequence as set forth in any one of SEQ ID NOs:22, 293, 294, 296 or 663, or having an amino acid sequence that is at least 70% identical to the sequence as set forth in any one of SEQ ID NOs:22, 293, 294, 296 or 663.

[0366] Embodiment II-68. The nucleic acid of any one of embodiments II-1 to II-67, wherein the nucleic acid encodes an amino acid sequence that is at least 80% identical to any one of SEQ ID NOs: 1-22, 27, 29, 31, 33, 35, 37, 39, 41, 43, 45, 47, 49, 51, 70-246, 248-259, 263-277, 293-307, or 341-368.

[0367] Embodiment II-69. The nucleic acid of any one of embodiments II-1 to II-67, wherein the nucleic acid encodes an amino acid sequence that is at least 85% identical to any one of SEQ ID NOs: 1-22, 27, 29, 31, 33, 35, 37, 39, 41, 43, 45, 47, 49, 51, 70-246, 248-259, 263-277, 293-307, or 341-368.

[0368] Embodiment II-70. The nucleic acid of any one of embodiments II-1 to II-67, wherein the nucleic acid encodes an amino acid sequence that is at least 90% identical to any one of SEQ ID NOs: 1-22, 27, 29, 31, 33, 35, 37, 39, 41, 43, 45, 47, 49, 51, 70-246, 248-259, 263-277, 293-307, or 341-368.

[0369] Embodiment II-71. The nucleic acid of any one of embodiments II-1 to II-67, wherein the nucleic acid encodes an amino acid sequence that is at least 95% identical to any one of SEQ ID NOs: 1-22, 27, 29, 31, 33, 35, 37, 39, 41, 43, 45, 47, 49, 51, 70-246, 248-259, 263-277, 293-307, or 341-368.

[0370] Embodiment II-72. The nucleic acid of any one of embodiments II-1 to II-67, wherein the nucleic acid encodes an amino acid sequence that is at least 99% identical to any of SEQ ID NOs: 1-22, 27, 29, 31, 33, 35, 37, 39, 41, 43, 45, 47, 49, 51, 70-246, 248-259, 263-277, 293-307, or 341-368.

[0371] Embodiment II-73. The nucleic acid of any one of embodiments II-1 to II-67, wherein the reverse transcriptase fusion protein consists of a polypeptide having an amino acid sequence of any of SEQ ID NOs: 1-22, 27, 29, 31, 33, 35, 37, 39, 41, 43, 45, 47, 49, 51, 70-246, 248-259, 263-277, 293-307, or 341-368.

[0372] Embodiment II-74. The nucleic acid of any one of embodiments II-1 to II-73, encoding a retroelement-derived reverse transcriptase domain having at least one amino acid substitution that stabilizes the reverse transcriptase domain and/or its association with RNA and/or DNA relative to an unsubstituted reverse transcriptase domain.

[0373] Embodiment II-75. The nucleic acid of any one of embodiments II-1 to II-73, encoding a retroelement-derived endonuclease domain comprising at least one amino acid substitution that promotes its association with DNA relative to an unsubstituted endonuclease domain.

[0374] Embodiment II-76. A nucleic acid encoding an engineered protein comprising a retroelement-derived polypeptide variant having at least one amino acid modification when compared to a naturally occurring retroelement-derived polypeptide;
[0375] wherein the retroelement-derived polypeptide variant is derived from a non-long terminal repeat (non-LTR) retrotransposon; and
[0376] wherein the engineered protein exhibits at least one improved characteristic, as compared to the naturally occurring retroelement-derived polypeptide without the at least one amino acid modification.

[0377] Embodiment II-77. The nucleic acid of embodiment II-76, wherein the amino acid modification is an amino acid substitution, an amino acid deletion, an amino acid addition, an amino acid truncation, or a combination thereof.

[0378] Embodiment II-78. The nucleic acid of embodiment II-76 or II-77, wherein the retroelement-derived polypeptide variant comprises an amino acid sequence that is at least 99% identical to any one of SEQ ID NOs: 70-246, 298-306, or 341-368.

[0379] Embodiment II-79. The nucleic acid of embodiment II-76 or II-77, wherein the non-LTR retrotransposon is a LINE2-2 retrotransposon.

[0380] Embodiment II-80. The nucleic acid of embodiment II-79, wherein the LINE2-2 retrotransposon is a zebra fish LINE2-2 (ZFL2-2) retrotransposon.

[0381] Embodiment II-81. The nucleic acid of embodiment II-79, wherein the retroelement-derived polypeptide variant comprises an amino acid sequence that is at least 95% identical, at least 97% identical, at least 99% identical, or 100% identical, to any one of SEQ ID NOs: 341-368.

[0382] Embodiment II-82. The nucleic acid of any one of embodiments II-79 to II-81, wherein the retroelement-derived polypeptide variant comprises at least one amino substitution corresponding to a substitution selected from the group consisting of: I343K, Q372K, D588A, N647K, H521P, S737P, P705A, M750L, A757P, and H717A relative to the wild-type ZFL2-2 retrotransposon having the sequence SEQ ID NO:49.

[0383] Embodiment II-83. The nucleic acid of embodiment II-82, wherein the retroelement-derived polypeptide variant comprises at least one amino substitution corresponding to a substitution selected from the group consisting of: N647K, H521P, S737P, and M750L relative to the wild-type ZFL2-2 retrotransposon having the sequence SEQ ID NO:49.

[0384] Embodiment II-84. The nucleic acid of embodiment II-76 or II-77, wherein the non-LTR retrotransposon is a Vingi-1 retrotransposon.

[0385] Embodiment II-85. The nucleic acid of embodiment II-76 or II-77, wherein the Vingi-1 retrotransposon is an Anolis carolinensis Vingi-1 retrotransposon.

[0386] Embodiment II-86. The nucleic acid of embodiment II-85, wherein the retroelement-derived polypeptide variant comprises an amino acid sequence that is at least 95% identical, at least 97% identical, at least 99% identical, or 100% identical to any one of SEQ ID NOs: 70-246 or 298-306.

[0387] Embodiment II-87. The nucleic acid of any one of embodiments II-83 to II-86, wherein the retroelement-derived polypeptide variant comprises at least one amino substitution corresponding to a substitution selected from the group consisting of: Q634L, F238Y+M16I, I45L, G833I, K703R, K480Q, K675R, P808K, M570L, L590F, M735E, K966R, A901H, and L493R relative to the wild-type Anolis carolinensis Vingi-1 retrotransposon having the sequence SEQ ID NO:327.

[0388] Embodiment II-88. The nucleic acid of any one of embodiments II-83 to II-86, wherein the retroelement-derived polypeptide variant comprises at least one amino substitution corresponding to a substitution selected from the group consisting of: M570L, K966R, and A901H. relative to the wild-type Anolis carolinensis Vingi-1 retrotransposon having the sequence SEQ ID NO:327.

[0389] Embodiment II-89. The nucleic acid of any one of embodiments II-76 to II-88, wherein the engineered protein further comprises at least one heterologous polypeptide.

[0390] Embodiment II-90. The nucleic acid of embodiment II-89, wherein the at least one heterologous polypeptide is capable of one or more of: promoting homology directed repair, promoting chromatin binding, promoting chromatin accessibility, promoting DNA binding, and promoting RNA binding.

[0391] Embodiment II-91. The nucleic acid of embodiment II-89 or II-90, wherein the at least one heterologous polypeptide comprises an RNA/DNA processing polypeptide or domain thereof.

[0392] Embodiment II-92. The nucleic acid of embodiment II-91, wherein the at least one heterologous polypeptide comprising an RNA/DNA processing polypeptide or domain thereof is capable of: RNAseH activity, DNA polymerase activity, inhibiting ApoBec3 deaminase, and/or strand invasion of single-stranded DNA.

[0393] Embodiment II-93. The nucleic acid of embodiment II-91, wherein the RNA/DNA processing polypeptide is a Rad51 polypeptide, a RAD17 polypeptide, or a RAD6 polypeptide.

[0394] Embodiment II-94. The nucleic acid of any one of embodiments II-89 to II-93, wherein the at least one heterologous polypeptide comprises an RNA/DNA repair polypeptide or domain thereof.

[0395] Embodiment II-95. The nucleic acid of embodiment II-94, wherein the at least one heterologous polypeptide comprising an RNA/DNA repair polypeptide or domain thereof is capable of: recruiting proteins involved in homologous recombination, recruiting DNA damage/signaling/repair factors, recruiting PCNA, inhibiting p53, and/or inhibiting 53BP1.

[0396] Embodiment II-96. The nucleic acid of embodiment II-94, wherein the RNA/DNA repair polypeptide is a CtIP-derived polypeptide, a RecT-derived polypeptide, an HSV-1 alkaline nuclease-derived polypeptide, a BRCA2-derived polypeptide, a DSS1-derived polypeptide, a nanog-derived polypeptide, an NBN-derived polypeptide, a RAD17-derived polypeptide, an ANKRD28-derived polypeptide, a PCNA interaction motif polypeptide, a MDC1-derived polypeptide, a MSH4-derived polypeptide, a SCML1-derived polypeptide, a CDKN2A-derived polypeptide, a 53BP1 inhibitor, or a p53 inhibitor.

[0397] Embodiment II-97. The nucleic acid of any one of embodiments II-89 to II-96, wherein the at least one heterologous polypeptide comprises a nucleic acid binding polypeptide or domain thereof.

[0398] Embodiment II-98. The nucleic acid of embodiment II-97, wherein the nucleic acid binding polypeptide comprises a non-sequence specific DNA binding polypeptide or domain thereof.

[0399] Embodiment II-99. The nucleic acid of embodiment II-98, wherein the non-sequence specific DNA binding polypeptide comprises a Sto7d DNA binding domain.

[0400] Embodiment II-100. The nucleic acid of embodiment II-97, wherein the nucleic acid binding polypeptide comprises a sequence specific DNA binding polypeptide or domain thereof.

[0401] Embodiment II-101. The nucleic acid of embodiment II-100, wherein the sequence specific DNA binding polypeptide is a Cas9 nuclease, dead Cas nuclease, SpCas9 having D10A and/or H840A amino acid substitutions, a Zinc finger DNA binding domain, or a transcription activator-like effector (TALE) DNA binding domain.

[0402] Embodiment II-102. A nucleic acid encoding a retroelement-derived reverse transcriptase domain comprising at least one amino acid modification that stabilizes the reverse transcriptase domain and/or stabilizes its association with RNA and/or DNA relative to an unsubstituted reverse transcriptase domain, wherein the reverse transcriptase domain is an amino acid variant of a reverse transcriptase domain of a non-LTR retrotransposon.

[0403] Embodiment II-103. The nucleic acid of embodiment II-102, wherein the non-LTR retrotransposon is a LINE-1, LINE-2, or a LINE-3/CR-1 retrotransposon.

[0404] Embodiment II-104. The nucleic acid of embodiment II-102, wherein the non-LTR retrotransposon is a retrotransposon from a clade selected from the group consisting of: CRE, R4, Hero, NeSL, R2, RandI, Proto1, L1, Tx1, RTEPT, Proto2, RTEX, RTE, Outcast, Ingi, I, Nimb, Tad1, Loa, R1, Jockey, Rex1, CR1, L2, L2A, L2B, Daphne, and Crack.

[0405] Embodiment II-105. The nucleic acid of embodiment II-102, wherein non-LTR retrotransposon is a LINE 2-2 retrotransposon.

[0406] Embodiment II-106. The nucleic acid of embodiment II-105, wherein the LINE-2-2 retrotransposon is a zebrafish LINE 2-2 retrotransposon.

[0407] Embodiment II-107. The nucleic acid of any one of embodiments II-102 to II-106, wherein the at least one amino acid modification stabilizes the reverse transcriptase domain relative to an unmodified reverse transcriptase domain.

[0408] Embodiment II-108. The nucleic acid of embodiment II-107, wherein the at least one amino acid modification a) improves packing of hydrophobic residues in the core of the reverse transcriptase domain, b) stabilizes a loop region of the reverse transcriptase domain, c) alters electrostatic or H-bond stability within the reverse transcriptase domain, d) reduces the size of the active site of the reverse transcriptase domain relative to an unsubstituted reverse transcriptase domain, and/or e) increases the size of an amino acid side chain in the active site of the reverse transcriptase domain relative to an unsubstituted reverse transcriptase domain.

[0409] Embodiment II-109. The nucleic acid of embodiment II-108, wherein
[0410] a) the at least one amino acid modification that stabilizes a loop region is a proline substitution and/or addition,
[0411] b) the at least one amino acid modification that alters electrostatic or H-bond stability substitutes a charge or H-bond acceptor/donor preference, or
[0412] c) the at least one amino acid modification that reduces the size of the active site and/or increases the size of an amino acid side chain in the active site of the reverse transcriptase domain comprises at least one amino substitution corresponding to a substitution selected from the group consisting of: A688V, A688I relative to SEQ ID NO: 51.

[0413] Embodiment II-110. The nucleic acid of embodiment II-109, wherein the amino acid modification that substitutes a charge or H-bond acceptor/donor preference:
[0414] a) substitutes a non-charged amino acid with a positively charged amino acid or a hydrogen bond donor (e.g., histidine),
[0415] b) substitutes a hydrogen bond donor with a charged amino acid, or
[0416] c) substitutes a negatively charged amino acid with a non-charged amino acid.

[0417] Embodiment II-111. The nucleic acid of any one of embodiments II-107 to II-110, wherein the reverse transcriptase domain comprises at least one amino modification corresponding to a substitution selected from the group consisting of:
[0418] a) I625L, H521P, S737P, P705A, M558L, M733L, M760S, M750L, A757P, H717A, H717K, D497S, I625H, L825G, D278S, L837I, A464P, K762R, A948T, P675S, H698P, L742P, E541K, Q547R, S814P, S672P, N560P, H853P, L514P, L524P, Q449P, H650P, G674P, S800P, I896P, S474P, and D520P, relative to SEQ ID NO: 51, and
[0419] b) N647K, H717K, I625H, and D520P, relative to SEQ ID NO: 51.

[0420] Embodiment II-112. The nucleic acid of any one of embodiments II-76 to II-106, wherein the at least one amino acid modification:
[0421] a) stabilizes the association of the reverse transcriptase domain with RNA and/or DNA relative to an unmodified reverse transcriptase domain; or
[0422] b) stabilizes the association of the RNA binding domain of the reverse transcriptase with its cognate RNA relative to an unmodified RNA binding domain.

[0423] Embodiment II-113. The nucleic acid of embodiment II-112, wherein the at least one amino acid modification a) adds a positive charge, b) removes a negative charge, or c) alters at least one H-bond forming residue.

[0424] Embodiment II-114. The nucleic acid of embodiment II-112 or II-113, wherein the reverse transcriptase domain comprises at least one amino modification corresponding to a substitution selected from the group consisting of:
[0425] a) D550T, D770H, K815R, S883R, K952R, K542R, N546R, H569R, S577R, H463K, Q478K, K566R, K815R, and S960R, relative to SEQ ID NO: 51, and
[0426] b) I343K, L354N, Q357K, and E366N, relative to SEQ ID NO: 51.

[0427] Embodiment II-115. A nucleic acid encoding a retroelement-derived endonuclease domain comprising at least one amino acid modification that promotes association of the retroelement-derived endonuclease domain with DNA relative to an unmodified endonuclease domain.

[0428] Embodiment II-116. The nucleic acid of embodiment II-115, wherein the at least one amino acid modification corresponds to a substitution selected from the group consisting of: Y139K, and D64K relative to SEQ ID NO: 51.

[0429] Embodiment II-117. The nucleic acid of any one of embodiments II-1 to II-116, wherein the nucleic acid is an RNA molecule.

[0430] Embodiment II-118. The nucleic acid of any one of embodiments II-1 to II-116, wherein the nucleic acid is a DNA molecule.

[0431] Embodiment II-119. The nucleic acid of embodiment II-118, wherein the nucleic acid comprises a T7 promoter.

[0432] Embodiment II-120. The nucleic acid of any one of embodiments II-1 to II-118, wherein the nucleic acid comprises a heterologous promoter.

[0433] Embodiment II-121. The nucleic acid of embodiment II-120, wherein the promoter is a constitutive promoter.

[0434] Embodiment II-122. The nucleic acid of embodiment II-120, wherein the promoter is an inducible promoter.

[0435] Embodiment II-123. The nucleic acid of embodiment II-120, wherein the promoter is a tissue specific promoter.

[0436] Embodiment II-124. The nucleic acid of embodiment II-120, wherein the promoter is selected from the group consisting of an EF1a promoter, a CMV promoter, an A1AT promoter, an Albumin gene promoter, an MNDU promoter, an SFFV promoter, and an ApoE promoter.

[0437] Embodiment II-125. The nucleic acid of any one of embodiments II-1 to II-124, wherein the nucleic acid comprises one or more chemical or sequence modifications.

[0438] Embodiment II-126. The nucleic acid of embodiment II-125, wherein the one or more chemical or sequence modifications are selected from the group consisting of an RNA CAP, a modified polyA length, a chemical modification (e.g., a pseudouridine and/or a methylpseudouridine), a 5′ UTR modification, a 3′ UTR modification, a modified Kozak sequence, a modified stem loop, an RNA stabilization motif, a 5-methoxyuridine (5-MO-U) modification, a 5-methylcytidine (5mC) modification, and one or more additional and/or modified microsatellites.

[0439] Embodiment II-127. The nucleic acid of any one of embodiments II-1 to II-126 comprising a codon optimized sequence.

[0440] Embodiment II-128. The nucleic acid of embodiment II-127, wherein the codon optimized sequence is optimized for expression in human cells.

[0441] Embodiment II-129. The nucleic acid of embodiment II-127, wherein the codon optimized sequence has a reduced Uracil (U) load relative to a corresponding naturally occurring sequence.

[0442] Embodiment II-130. The nucleic acid of embodiment II-126, wherein the RNA stabilization motif is a WPRE motif.

[0443] Embodiment II-131. An engineered protein encoded by any one of the nucleic acids of any one of embodiments II-1 to II-130.

[0444] Embodiment II-132. A composition comprising:
[0445] a) a first nucleic acid of any one of embodiments II-1 to I1-130; and
[0446] b) a second nucleic acid comprising a polynucleotide encoding a gene of interest.

[0447] Embodiment II-133. The composition of embodiment II-132, wherein the first and second nucleic acids are separate DNA molecules.

[0448] Embodiment II-134. The composition of embodiment II-132, wherein the first and second nucleic acids are separate RNA molecules.

[0449] Embodiment II-135. The composition of embodiment II-132, wherein the one of the first and second nucleic acids is a DNA molecule and one of the first and second nucleic acids is an RNA molecule.

[0450] Embodiment II-136. The composition of any one of embodiments II-132 to II-135, wherein the first polynucleotide is operably linked to a first heterologous promoter.

[0451] Embodiment II-137. The composition of any one of embodiments I1-132 to I1-136, wherein the second polynucleotide is operably linked to a second heterologous promoter.

[0452] Embodiment II-138. The composition of embodiment II-136 or II-137, wherein at least one of the first and second heterologous promoters is a constitutive promoter.

[0453] Embodiment II-139. The composition of embodiment II-136 or II-137, wherein at least one of the first and second heterologous promoters is an inducible promoter.

[0454] Embodiment II-140. The composition of embodiment II-136 or II-137, wherein at least one of the first and second heterologous promoters is a constitutive promoter.

[0455] Embodiment II-141. The composition of embodiment II-136 or II-137, wherein the first and second heterologous promoters are independently an EF1a promoter, a CMV promoter, an A1AT promoter, an Albumin gene promoter, MNDU promoter, SFFV promoter, or an ApoE promoter.

[0456] Embodiment II-142. The composition of any one of embodiments II-132 to II-141, wherein one or both of the first and second nucleic acids further comprise one or more of the following modifications: an RNA CAP, a modified polyA length, a chemical modification, a 5′ UTR modification, a 3′ UTR modification, a modified Kozak sequence, a modified stem loop, an RNA stabilization motif, a 5-methoxyuridine (5-MO-U) modification, a 5-methylcytidine (5mC) modification, or one or more additional and/or modified microsatellites.

[0457] Embodiment II-143. The composition of any one of embodiments II-132 to II-142, wherein one or both of the first and second nucleic acids comprises a codon optimized sequence.

[0458] Embodiment II-144. The composition of embodiment II-143, wherein the codon optimized sequence is optimized for expression in human cells.

[0459] Embodiment II-145. The composition of embodiment II-143, wherein the codon optimized sequence has a reduced Uracil (U) load relative to a corresponding naturally occurring sequence.

[0460] Embodiment II-146. The composition of embodiment II-142, wherein the RNA stabilization motif is a WPRE motif.

[0461] Embodiment II-147. The composition of any one of embodiments II-132 to II-146, wherein one or both of the first and second nucleic acids further comprise an RNA nuclear localization sequence.

[0462] Embodiment II-148. The composition of embodiment II-147, wherein the RNA nuclear localization sequence is an SAFB motif.

[0463] Embodiment II-149. The composition of any one of embodiments I1-132 to I1-148, wherein the second polynucleotide is flanked by a first terminal region and a second terminal region.

[0464] Embodiment II-150. The composition of embodiment II-149, wherein the first and second terminal regions are LTRs.

[0465] Embodiment II-151. The composition of embodiment II-149, wherein the first terminal region is the 5′ UTR of a LINE, and the second terminal region is the 3′ UTR of a LINE.

[0466] Embodiment II-152. The composition of embodiment II-151, wherein the LINE 3′UTR region comprises a truncated stem loop relative to a wild-type stem loop.

[0467] Embodiment II-153. The composition of any one of embodiments I1-132 to I1-152, wherein the second nucleic acid further comprises a 5′ UTR, a 3′UTR, a polyA sequence, a sequence that is recognized, by the engineered protein encoded by the first nucleic acid, for binding, reverse transcription, and integration of the gene of interest into a target nucleic acid.

[0468] Embodiment II-154. The composition of embodiment II-153, wherein the target nucleic acid is a genome of a target cell.

[0469] Embodiment II-155. The composition of any one of embodiments II-132 to II-154, wherein the second nucleic acid comprises i) a promoter operably linked to the second polynucleotide encoding the gene of interest, and ii) a polyadenylation sequence, and wherein the promoter is selectively active in one or more target cell types.

[0470] Embodiment II-156. The composition of any one of embodiments II-132 to II-155, wherein the gene of interest encodes a therapeutic RNA and/or a therapeutic protein.

[0471] Embodiment II-157. The composition of embodiment II-156, wherein the therapeutic RNA is an antisense RNA (asRNA), small interfering RNA (siRNA), microRNA (miRNA), or RNA aptamer.

[0472] Embodiment II-158. The composition of embodiment II-156, wherein the therapeutic protein is an antibody, regulatory protein, hormone, cytokine, structural protein, enzyme, or membrane protein.

[0473] Embodiment II-159. The composition of embodiment II-156, wherein the therapeutic protein is Factor VIII, Factor IX, Phenylalanine hydroxylase, ATP7B, alpha glucosidase, argininosuccinate synthetase, galactose-1-phosphate uridyltransferase, or ornithine transcarbamylase.

[0474] Embodiment II-160. The composition of any one of embodiments II-132 to II-159, wherein the second nucleic acid comprises flanking regions homologous to target sites in a genome of a target cell.

[0475] Embodiment II-161. The composition of any one of embodiments II-132 to II-160, wherein the first and second nucleic acids are comprised within a plurality of LNP particles.

[0476] Embodiment II-162. A method of modifying a polynucleotide, comprising contacting a polynucleotide with a nucleic acid of any one of embodiments II-1 to II-130, a composition of any one of embodiments II-132 to II-161, or an engineered protein embodiment II-131 to a subject.

[0477] Embodiment II-163. The method of embodiment II-162, wherein the polynucleotide is in a cell.

[0478] Embodiment II-164. A method of treating a subject in need thereof, comprising administering to the subject a nucleic acid of any one of embodiments II-1 to II-130, a composition of any one of embodiments II-132 to II-161, or an engineered protein embodiment 1I-131 to a subject.

[0479] Embodiment II-165. Use of a nucleic acid of any one of embodiments II-1 to II-130, an engineered protein of embodiment II-131 or a composition of any one of embodiments II-132 to II-161 to treat a subject in need thereof.

[0480] Embodiment II-166. The method of embodiment II-162, or use of embodiment II-165, wherein the subject is a human.

[0481] Embodiment II-167. A nucleic acid encoding an engineered protein comprising a retroelement-derived polypeptide variant comprising an amino acid modification when compared to a wild type retroelement-derived polypeptide;
[0482] wherein the retroelement-derived polypeptide variant is derived from a non-long terminal repeat (non-LTR) retrotransposon; and
[0483] wherein the engineered protein exhibits at least one improved characteristic, as compared to the wild-type retroelement-derived polypeptide without the at least one amino acid modification.

[0484] These and other aspects are illustrated by the following non-limiting examples.

### EXAMPLES

### Example 1

[0485] Non-limiting examples of engineered proteins that can be used (e.g., directly or encoded on an RNA and/or DNA molecule) to promote integration of a heterologous gene into a target nucleic acid in a host cell include protein fusions comprising at least one domain of a retroelement-derived protein fused to at least one heterologous polypeptide that redirects and/or enhances insertion of the heterologous gene. In some embodiments, each of the at least one heterologous polypeptide comprises one or more of an RNA/DNA processing polypeptide, an RNA/DNA repair polypeptide, a nucleic acid binding polypeptide, or a nucleosome binding polypeptide. The at least one heterologous polypeptide can be fused to the N-terminus and/or C-terminus of a retroelement-derived protein or protein domain, and/or internally within a retroelement-derived protein (e.g., between two domains of the protein). Nucleic acids (e.g., RNA and/or DNA) encoding one or more engineered proteins can be used to promote insertion of a transgene (e.g., a heterologous nucleic acid comprising a gene of interest) flanked by retroelement-derived terminal regions (e.g., by 5′ and 3′ terminal regions) into a target nucleic acid. In some embodiments, a first nucleic acid that encodes an engineered protein is provided (e.g., administered to a subject) along with a separate second nucleic acid that includes a transgene flanked by the retroelement-derived terminal regions. In some embodiments, the nucleic acid that encodes the engineered protein and the transgene that is flanked by retroelement-derived terminal regions are provided (e.g., administered to a subject) on the same nucleic acid molecule.

a) Examples of Different Non-Limiting Protein Configurations that Include a Retroelement Derived RT-EN Protein or Domain Fused to One or More Heterologous Polypeptides (HPs)

[0486] The following schemes represent non-limiting alternative configurations of one or more heterologous polypeptides fused to a retroelement-derived polypeptide that includes an endonuclease domain (EN) and/or a reverse transcriptase domain (RT). A heterologous polypeptide fused to an N-terminus of the retroelement-derived polypeptide is referred to herein as an nHP. A heterologous polypeptide fused to a C-terminus of the retroelement-derived polypeptide is referred to herein as a cHP. An internally fused heterologous polypeptide is referred to as an iHP. “N-” indicates the N-terminus of the fusion protein, and “—C” indicates the C-terminus of the fusion protein. In some embodiments, a retroelement-derived polypeptide is modified to remove the naturally occurring endonuclease domain (e.g., to remove a restriction-like endonuclease (RLE) domain). In some embodiments, a heterologous endonuclease domain (hEN) is fused to the RT domain of the retroelement-derived polypeptide (e.g., to replace the naturally occurring endonuclease domain). In some embodiments, a heterologous polypeptide comprises one or more linkers and/or a localization polypeptide (e.g., NLS or NoLS). For example, a linker may be located at the N-terminus and/or the C-terminus of a heterologous polypeptide to connect the heterologous polypeptide to a retroelement-derived polypeptide. In some embodiments, the heterologous polypeptide may include one or more internal linkers, for example between different domains (e.g., different enzymatic domains) of the heterologous polypeptide.

### Fusions to a Retroelement-Derived Polypeptide:

[0487] i) N-nHP-RT-EN-C
[0488] ii) N-RT-EN-cHP-C
[0489] iii) N-nHP-RT-EN-cHP-C
[0490] iv) N-nHP-RT-iHP-EN-C
[0491] v) N-RT-iHP-EN-cHP-C
[0492] vi) N-nHP-RT-iHP-EN-cHP-C
   Fusions to a Retroelement-Derived Polypeptide Comprising a Heterologous Endonuclease Domain (hEN):
[0493] i) N-nHP-RT-hEN-C
[0494] ii) N-RT-hEN-cHP-C
[0495] iii) N-nHP-RT-hEN-cHP-C
[0496] iv) N-nHP-RT-iHP-hEN-C
[0497] v) N-RT-iHP-hEN-cHP-C
[0498] vi) N-nHP-RT-iHP-hEN-cHP-C

### Domain Fusions:

[0499] i) N-nHP-RT-C
[0500] ii) N-RT-cHP-C
[0501] iii) N-nHP-EN-C
[0502] iv) N-EN-cHP-C
   b) Examples of Different Non-Limiting Protein Configurations that Include a Retroelement Derived EN-RT Protein or Domain (e.g., from an L1, RTE, I, or Jockey Type Retroelement) Fused to One or More Heterologous Polypeptides (HPs)

[0503] The following schemes represent non-limiting alternative configurations of one or more heterologous polypeptides fused to a retroelement-derived polypeptide that include an endonuclease domain (EN) and/or a reverse transcriptase domain (RT). A heterologous polypeptide fused to an N-terminus of the retroelement-derived polypeptide is referred to herein as an nHP. A heterologous polypeptide fused to a C-terminus of the retroelement-derived polypeptide is referred to herein as a cHP. An internally fused heterologous polypeptide is referred to as an iHP. “N-” indicates the N-terminus of the fusion protein, and “-C” indicates the C-terminus of the fusion protein. In some embodiments, a retroelement-derived polypeptide is modified to remove the naturally occurring endonuclease domain (e.g., to remove an apurinic-apyrimidinic endonuclease (APE) domain). In some embodiments, a heterologous endonuclease domain (hEN) is fused to the RT domain (e.g., to replace the naturally occurring endonuclease domain). In some embodiments, a heterologous polypeptide comprises one or more linkers and/or a localization polypeptide (e.g., NLS or NoLS). For example, a linker may be located at the N-terminus and/or the C-terminus of a heterologous polypeptide to connect the heterologous polypeptide to a retroelement-derived polypeptide. In some embodiments, the heterologous polypeptide may include one or more internal linkers, for example between different domains (e.g., different enzymatic domains) of the heterologous polypeptide.

### Fusions to a Retroelement-Derived Polypeptide:

[0504] i) N-nHP-EN-RT-C
[0505] ii) N-EN-RT-cHP-C
[0506] iii) N-nHP-EN-RT-cHP-C
[0507] iv) N-nHP-EN-iHP-RT-C
[0508] v) N-EN-iHP-RT-cHP-C
[0509] vi) N-nHP-EN-iHP-RT-cHP-C
   Fusions to a Retroelement-Derived Polypeptide Comprising a Heterologous Endonuclease Domain (hEN):
[0510] i) N-nHP-hEN-RT-C
[0511] ii) N-hEN-RT-cHP-C
[0512] iii) N-nHP-hEN-RT-cHP-C
[0513] iv) N-nHP-hEN-iHP-RT-C
[0514] v) N-hEN-iHP-RT-cHP-C
[0515] vi) N-nHP-hEN-iHP-RT-cHP-C

### Domain Fusions:

[0516] i) N-nHP-RT-C
[0517] ii) N-RT-cHP-C
[0518] iii) N-nHP-EN-C
[0519] iv) N-EN-cHP-C

[0520] One or more nucleic acids (e.g., RNA and/or DNA) encoding at least one of these engineered proteins can be provided, in trans or in cis, to target cells (e.g., ex vivo or in vivo) along with one or more nucleic acids (e.g., RNA and/or DNA) encoding a transgene (e.g., flanked by terminal regions) to promote integration of the transgene into a nucleic acid (e.g., a genomic nucleic acid) of the target cells.

### Example 2

[0521] Non-limiting examples of engineered proteins that can be used (e.g., directly or encoded on an RNA and/or DNA molecule) as drivers to promote insertion of a transgene into a target nucleic acid (e.g., a host genome) are provided. One or more of the following engineered proteins can be provided alone or in combination with other engineered proteins. One or more of the following engineered proteins that are illustrated as N-terminal fusions (a heterologous polypeptide having one or more enzyme domains, e.g., 1, 2, 3, or more domains, fused to the N-terminus of a retroelement-derived polypeptide) also could be provided as C-terminal fusions (the heterologous polypeptide fused to the C-terminus of the retroelement-derived polypeptide) or as internal fusions. Similarly, one or more of the following engineered proteins that are illustrated as C-terminal fusions also could be provided as N-terminal fusions, and/or as internal fusions In some embodiments, alternative linker sequences and/or lengths could be included in the heterologous polypeptide. In some embodiments, no linkers are used between domains. In some embodiments, a nuclear and/or nucleolar localization sequence could be included.

[0522] In some embodiments, the engineered protein (for use, e.g., as a driver) may comprise a retroelement-derived polypeptide comprising a wild-type zebrafish LINE 2-2 (ZFL2-2) retroelement (SM002), the retroelement-derived polypeptide having the following sequence:

SM002 amino acid sequence:
(SEQ ID NO: 51)
MCFLIPVVINTRKTREVRCKRNPHNLRSIHVSTISQLSLSVGLWNCQSAVNKADFITSIATYSD
YNLMALTETWLRPEDTATHATLSANFSFSHTPRQTGRGGGTGLLISKEWKFTLIPSLPTISSFE
FHAVTIIHPFYINVVVIYRPPGKLGHFLDELDVLLSSFSNFDTPLLVLGDFNIYVDKPQAADFQ
TLLASFDLKRAPTSATHKSGNQLDLIYTRHCFTDQTIVTPLQISDHFLLSLNIHITPEPPHTPT
LVTFRRNLRSLSPNRLSTIVSDSLPPSRKLTALDSNSATNTLCSTLASCLDRLCPLASRPARAS
PPAPWLSDALREHRSKLRAAERIWRKTKNPAHLLTYQTLLSSFSAEVTSAKQTYYRLKINNAIN
PRLLFKTFSSLLYPPPPPASSTLTTDDFATFFCTKTAKISAQFAAPTINTQDTTPTPHILISFS
QLSESEVSKLVLSSHATTCPLDPIPSHLLQAISPAVIPTLTHIINTSLDSGLFPTTFKQARVTP
LLKKPNLDHTLLENYRPVSLLPFMAKILEKVVFNQVLDFLTQNNLMDNKQSGFKKGHSTETALL
SVVEDLRLAKADSKSSVLILLDLSAAFDTVNHQILLSTLESLGVAGTVIQWFRSYLSDRSFRVS
WRGEVSNLQHLNTGVPQGSVLGPLLFSIYTSSLGPVIQRHGFSYHCYADDTQLYLSFHPDDPSV
PARISACLLDISHWMKDHHLQLNLAKTEMLVVSANPTLHHNFSIQMDGATITASKMVKSLGVTI
DDQLNFSDHISRTARSCRFALYNIRKIRPFLSEHAAQLLVQALVLSKLDYCNSLLALLPANSIK
PLQLLQNAAARVVFNEPKRAHVTPLLVRLHWLPVAARIKFKTLMFAYKVTSGLAPSYLHSLLQI
YVPSRNLRSVNERRLVVPSQRGKKSLSRTLTLNLPSWWNELPNCIRTAESLAIFKKRLKTQLFS
LHFTS

[0523] In some examples, the following CtIP N-terminal fragment (SEQ ID:310) was incorporated into an engineered protein (e.g. as an N-terminal fusion with the N-terminus of a retroelement-derived polypeptide) for use, e.g., as a driver:

(SEQ ID: 310)
NISGSSCGSPNSADTSSDFKDLWTKLKECHDREVQGLQVKVTKLK
QERILDAQRLEEFFTKNQQLREQQKVLHETIKVLEDRLRAGLCDR
CAVTEEHMRKKQQEFENIRQQNLKLITELMNERNTLQEENKKLSE
QLQQKIENDQQHQAAELECEEDVIPDSPITAFSESGVNRLRRKEN
PHVRYIEQTHTKLEHSVCANEMRKVSKSSTHPQHNPNENEILVAD
TYDQSQSPMAKAHGTSSYTPDKSSFNLATVVAETLGLGVQEESET
QGPMSPLGDELYHCLEGNHKKQPFES

[0524] In some examples, the following RAD51-derived protein (SEQ ID NO: 311) was incorporated into an engineered protein (e.g., as an N-terminal fusion with the N-terminus of a retroelement-derived polypeptide) for use, e.g., as a driver:

(SEQ ID NO: 311)
GIHGVPAAAMQMQLEANADTSVEEESFGPQPISRLEQCGINANDV
KKLEEAGFHTVEAVAYAPKKELINIKGISEAKADKILAEAAKLVP
MGFTTETEFHQRRSEIIQITTGSKELDKLLQGGIETGSITEMFGE
FRTGKTQICHTLAVTCQLPIDRGGGEGKAMYIDTEGTFRPERLLA
VAERYGLSGSDVLDNVAYARAFNTDHQTQLLYQASAMMVESRYAL
LIVDSATALYRTDYSGRGELSARQMHLARFLRMLLRLADEFGVAV
VITNQVVAQVDGAAMFAADPKKPIGGNIIAHASTTRLYLRKGRGE
TRICKIYDSPCLPEAEAMFAINADGVGDAKD

[0525] In some examples, the following UL12 protein (SEQ ID NO: 25) was incorporated into an engineered protein (e.g., as an N-terminal fusion with the N-terminus of a retroelement-derived polypeptide) for use, e.g., as a driver:

(SEQ ID NO: 25)
ESTVGPACPPGRTVTKRPWALAEDTPRGPDSPPKRPRPNSLPLTT
TFRPLPPPPQTTSAVDPSSHSPVNPPRDQHATDTADEKPRAASPA
LSDASGPPTPDIPLSPGGTHARDPDADPDSPDLDS

[0526] In some examples, the following BRCA2-derived protein (SEQ ID NO: 308) was incorporated into an engineered protein (e.g., as an N-terminal fusion with the N-terminus of a retroelement-derived polypeptide) for use, e.g., as a driver:

(SEQ ID NO: 308)
PTLLGFHTASGKKVKIAKESLDKVKNLFDEKEQ

[0527] In some examples, the following DSS1-derived protein (SEQ ID NO: 309) was incorporated into an engineered protein (e.g., as an N-terminal fusion with the N-terminus of a retroelement-derived polypeptide) for use, e.g., as a driver:

(SEQ ID NO: 309)
SEKKQPVDLGLLEEDDEFEEFPAEDWAGLDEDEDAHVWEDNWDDD
NVEDDFSNQLRAELEKHGYKMETS

[0528] In some examples, the following HMGN1 polypeptide (SEQ ID NO: 23) was incorporated into an engineered protein (e.g., as an N-terminal fusion with the N-terminus of a retroelement-derived polypeptide) for use, e.g., as a driver:

(SEQ ID NO: 23)
MPKRKVSSAEGAAKEEPKRRSARLSAKPPAKVEAKPKKAAAKDKS
SDKKVQTKGKRGAKGKQAEVANQETKEDLPAENGETKTEESPASD
EAGEKEAKSD

[0529] In some examples, the following HMGB1 polypeptide (SEQ ID NO: 24) was incorporated into an engineered protein (e.g., as C-terminal fusion with the C-terminus of a retroelement-derived polypeptide) for use, e.g., as a driver:

(SEQ ID NO: 24)
GKGDPKKPRGKMSSYAFFVQTCREEHKKKHPDASVNFSEFSKKCS
ERWKTMSAKEKGKFEDMAKADKARYEREMKTYIPPKGE

[0530] In some examples, the following Sto7d polypeptide (SEQ ID NO: 26) was incorporated into an engineered protein (e.g., as a C-terminal fusion) for use, e.g., as a driver:

(SEQ ID NO: 26)
VTVKFKYKGEEKEVDISKIKKVWRVGKMISFTYDDNGKTGRGAVS
EKDAPKELLQMLEK

[0531] In some examples the following Nibrin derived MRE11 recruitment peptide (SEQ ID NO: 312) was incorporated into an engineered protein (e.g., as a C-terminal fusion) for use, e.g., as a driver:

(SEQ ID NO: 312)
KNSTSRNPSGINDDYGQLKNFKKFKKVTYGS

[0532] In some examples the following MDM2 derived p53 inhibitory peptide (SEQ ID NO: 313) was incorporated into an engineered protein (e.g., as a C-terminal fusion) for use, e.g., as a driver:

(SEQ ID NO: 313)
CNTNMSVPTDGAVTTSQIPASEQETLVRPKPLLLKLLKSVGAQKD
TYTMKEVLFYLGQYIMTKRLYDEKQQHIVYCSNDLLGDLFGVPSF
SVKEHRKIYTMIYRNLVVVNQQESSDSGTSVSENGS

[0533] In some examples the following p53 inhibitory peptide (SEQ ID NO: 314) was incorporated into an engineered protein (e.g., as a C-terminal fusion) for use, e.g., as a driver:

(SEQ ID NO: 314)
YGFRLGFLHSGTAKSVTCTYGS

[0534] In some examples the following Nango-derived peptide (SEQ ID NO: 315) was incorporated into an engineered protein (e.g., as a C-terminal fusion) for use, e.g., as a driver:

(SEQ ID NO: 315)
LQSCMQFQPNSPASDLEAALEAAGEGLNVIQQTTRYFSTPQTMDL
FLNYSMNMQPEDVGS

[0535] In some examples the following E. coli RnaseH1 domain (SEQ ID NO: 316) was incorporated into an engineered protein (e.g., as a C-terminal fusion) for use, e.g., as a driver:

(SEQ ID NO: 316)
LKQVEIFTDGSCLGNPGPGGYGAILRYRGREKTFSAGYTRTTNNR
MELMAAIVALEALKEHCEVILSTDSQYVRQGITQWIHNWKKRGWK
TADKKPVKNVDLWQRLDAALGQHQIKWEWVKGHAGHPENERCDEL
ARAAAMNPTLEDTGYQVEVGS

[0536] In some examples the following human RNase H1 catalytic domain (SEQ ID NO: 317) was incorporated into an engineered protein (e.g., as a C-terminal fusion) for use, e.g., as a driver:

(SEQ ID NO: 317)
GDFVVVYTDGCCSSNGRRRPRAGIGVYWGPGHPLNVGIRLPGRQT
NQRAEIHAACKAIEQAKTQNINKLVLYTDSMFTINGITNWVQGWK
KNGWKTSAGKEVINKEDFVALERLTQGMDIQWMHVPGHSGFIGNE
EADRLAREGAKQSEDGS

[0537] In some examples the following zinc finger AAVS1 DNA-binding domain (SEQ ID NO: 318) was incorporated into an engineered protein (e.g., as an N-terminal fusion) for use, e.g., as a driver:

(SEQ ID NO: 318)
GIHGVPAAMAERPFQCRICMRNFSYNWHLQRHIRTHTGEKPFACD
ICGRKFARSDHLTTHTKIHTGSQKPFQCRICMRNFSHNYARDCHI
RTHTGEKPFACDICGRKFAQNSTRIGHTKIHLRGSSGSETPGTSE
SATPEGIHGVPAAMAERPFQCRICMRNFSQSSNLARHIRTHTGEK
PFACDICGRKFARTDYLVDHTKIHTGSQKPFQCRICMRNFSYNTH
LTRHIRTHTGEKPFACDICGRKFAQGYNLAGHTKIHLRGS

[0538] In some examples, the following dead SpCas9 (containing mutations D10A and H840A; SEQ ID NO: 330) was incorporated into an engineered protein (e.g., as an N-terminal fusion) for use, e.g., as a driver:

(SEQ ID NO: 330)
MDKKYSIGLAIGTNSVGWAVITDEYKVPSKKFKVLGNTDRHSIKK
NLIGALLFDSGETAEATRLKRTARRRYTRRKNRICYLQEIFSNEM
AKVDDSFFHRLEESFLVEEDKKHERHPIFGNIVDEVAYHEKYPTI
YHLRKKLVDSTDKADLRLIYLALAHMIKFRGHFLIEGDLNPDNSD
VDKLFIQLVQTYNQLFEENPINASGVDAKAILSARLSKSRRLENL
IAQLPGEKKNGLFGNLIALSLGLTPNFKSNFDLAEDAKLQLSKDT
YDDDLDNLLAQIGDQYADLFLAAKNLSDAILLSDILRVNTEITKA
PLSASMIKRYDEHHQDLTLLKALVRQQLPEKYKEIFFDQSKNGYA
GYIDGGASQEEFYKFIKPILEKMDGTEELLVKLNREDLLRKQRTF
DNGSIPHQIHLGELHAILRRQEDFYPFLKDNREKIEKILTFRIPY
YVGPLARGNSRFAWMTRKSEETITPWNFEEVVDKGASAQSFIERM
TNFDKNLPNEKVLPKHSLLYEYFTVYNELTKVKYVTEGMRKPAFL
SGEQKKAIVDLLFKTNRKVTVKQLKEDYFKKIECFDSVEISGVED
RFNASLGTYHDLLKIIKDKDFLDNEENEDILEDIVLTLTLFEDRE
MIEERLKTYAHLFDDKVMKQLKRRRYTGWGRLSRKLINGIRDKQS
GKTILDFLKSDGFANRNFMQLIHDDSLTFKEDIQKAQVSGQGDSL
HEHIANLAGSPAIKKGILQTVKVVDELVKVMGRHKPENIVIEMAR
ENQTTQKGQKNSRERMKRIEEGIKELGSQILKEHPVENTQLQNEK
LYLYYLQNGRDMYVDQELDINRLSDYDVDAIVPQSFLKDDSIDNK
VLTRSDKNRGKSDNVPSEEVVKKMKNYWRQLLNAKLITQRKFDNL
TKAERGGLSELDKAGFIKRQLVETRQITKHVAQILDSRMNTKYDE
NDKLIREVKVITLKSKLVSDFRKDFQFYKVREINNYHHAHDAYLN
AVVGTALIKKYPKLESEFVYGDYKVYDVRKMIAKSEQEIGKATAK
YFFYSNIMNFFKTEITLANGEIRKRPLIETNGETGEIVWDKGRDF
ATVRKVLSMPQVNIVKKTEVQTGGFSKESILPKRNSDKLIARKKD
WDPKKYGGFDSPTVAYSVLVVAKVEKGKSKKLKSVKELLGITIME
RSSFEKNPIDFLEAKGYKEVKKDLIIKLPKYSLFELENGRKRMLA
SAGELQKGNELALPSKYVNFLYLASHYEKLKGSPEDNEQKQLFVE
QHKHYLDEIIEQISEFSKRVILADANLDKVLSAYNKHRDKPIREQ
AENIIHLFTLTNLGAPAAFKYFDTTIDRKRYTSTKEVLDATLIHQ
SITGLYETRIDLSQLGGD

[0539] In some examples, the following PCSK9 homing endonuclease SEQ ID NO: 331) was incorporated into an engineered protein (e.g., as an N-terminal fusion) for use, e.g., as a driver:

(SEQ ID NO: 331)
NTKYNKEFLLYLAGFVDGDGSIFARIKPSQRSKFKHKLHLVFAVY
QKTQRRWFLDKLVDEIGVGYVLDSGSVSFYSLSEIKPLHNFLTQL
QPFLKLKQKQANLVLKIIEQLPSAKESPDKFLEVCTWVDQIAALN
DSKTRKTTSETVRAVLDSLPGSVGGLSPSQASSAASSASSSPGSG
ISEALRAGAGSGTGYNKEFLLYLAGFVDGDGSIYARIKPVQRAKF
KHELVLGFDVTQKTQRRWFLDKLVDEIGVGYVYDKGSVSAYRLSQ
IKPLHNFLTQLQPFLKLKQKQANLVLKIIEQLPSAKESPDKFLEV
CTWVDQIAALNDSKTRKTTSETVRAVLDSLSEKKKSSP

[0540] In some examples, the following PCSK9 homing nickase (Q47E substitution; SEQ ID NO: 332) was incorporated into an engineered protein (e.g., as an N-terminal fusion) for use, e.g., as a driver:

(SEQ ID NO: 332)
NTKYNKEFLLYLAGFVDGDGSIFARIKPSQRSKFKHKLHLVFAVY
EKTQRRWFLDKLVDEIGVGYVLDSGSVSFYSLSEIKPLHNFLTQL
QPFLKLKQKQANLVLKIIEQLPSAKESPDKFLEVCTWVDQIAALN
DSKTRKTTSETVRAVLDSLPGSVGGLSPSQASSAASSASSSPGSG
ISEALRAGAGSGTGYNKEFLLYLAGFVDGDGSIYARIKPVQRAKF
KHELVLGFDVTQKTQRRWFLDKLVDEIGVGYVYDKGSVSAYRLSQ
IKPLHNFLTQLQPFLKLKQKQANLVLKIIEQLPSAKESPDKFLEV
CTWVDQIAALNDSKTRKTTSETVRAVLDSLSEKKKSSP

[0541] In some examples, the following Cas9 nickase (H840A substitution; SEQ ID NO: 333) was incorporated into an engineered protein (e.g., as an N-terminal fusion) for use, e.g., as a driver:

(SEQ ID NO: 333)
MDKKYSIGLDIGTNSVGWAVITDEYKVPSKKFKVLGNTDRHSIKK
NLIGALLFDSGETAEATRLKRTARRRYTRRKNRICYLQEIFSNEM
AKVDDSFFHRLEESFLVEEDKKHERHPIFGNIVDEVAYHEKYPTI
YHLRKKLVDSTDKADLRLIYLALAHMIKFRGHFLIEGDLNPDNSD
VDKLFIQLVQTYNQLFEENPINASGVDAKAILSARLSKSRRLENL
IAQLPGEKKNGLFGNLIALSLGLTPNFKSNFDLAEDAKLQLSKDT
YDDDLDNLLAQIGDQYADLFLAAKNLSDAILLSDILRVNTEITKA
PLSASMIKRYDEHHQDLTLLKALVRQQLPEKYKEIFFDQSKNGYA
GYIDGGASQEEFYKFIKPILEKMDGTEELLVKLNREDLLRKQRTF
DNGSIPHQIHLGELHAILRRQEDFYPFLKDNREKIEKILTFRIPY
YVGPLARGNSRFAWMTRKSEETITPWNFEEVVDKGASAQSFIERM
TNFDKNLPNEKVLPKHSLLYEYFTVYNELTKVKYVTEGMRKPAFL
SGEQKKAIVDLLFKTNRKVTVKQLKEDYFKKIECFDSVEISGVED
RFNASLGTYHDLLKIIKDKDFLDNEENEDILEDIVLTLTLFEDRE
MIEERLKTYAHLFDDKVMKQLKRRRYTGWGRLSRKLINGIRDKQS
GKTILDFLKSDGFANRNFMQLIHDDSLTFKEDIQKAQVSGQGDSL
HEHIANLAGSPAIKKGILQTVKVVDELVKVMGRHKPENIVIEMAR
ENQTTQKGQKNSRERMKRIEEGIKELGSQILKEHPVENTQLQNEK
LYLYYLQNGRDMYVDQELDINRLSDYDVDAIVPQSFLKDDSIDNK
VLTRSDKNRGKSDNVPSEEVVKKMKNYWRQLLNAKLITQRKFDNL
TKAERGGLSELDKAGFIKRQLVETRQITKHVAQILDSRMNTKYDE
NDKLIREVKVITLKSKLVSDFRKDFQFYKVREINNYHHAHDAYLN
AVVGTALIKKYPKLESEFVYGDYKVYDVRKMIAKSEQEIGKATAK
YFFYSNIMNFFKTEITLANGEIRKRPLIETNGETGEIVWDKGRDF
ATVRKVLSMPQVNIVKKTEVQTGGFSKESILPKRNSDKLIARKKD
WDPKKYGGFDSPTVAYSVLVVAKVEKGKSKKLKSVKELLGITIME
RSSFEKNPIDFLEAKGYKEVKKDLIIKLPKYSLFELENGRKRMLA
SAGELQKGNELALPSKYVNFLYLASHYEKLKGSPEDNEQKQLFVE
QHKHYLDEIIEQISEFSKRVILADANLDKVLSAYNKHRDKPIREQ
AENIIHLFTLTNLGAPAAFKYFDTTIDRKRYTSTKEVLDATLIHQ
SITGLYETRIDLSQLGGD

[0542] In addition, in some examples one or more nuclear or nucleolar localization sequences were included into an engineered protein (e.g., as a N or C-terminal fusion) for use, e.g., as a driver:

SV40 NLS:
(SEQ ID NO: 54)
PKKKRKV
Nucleoplasmin NLS:
(SEQ ID NO: 55)
KRPAATKKAGQAKKKK
Bipartite SV40 NLS:
(SEQ ID NO: 56)
KRTADGSEFESPKKKRKV
PNRC NLS:
(SEQ ID NO: 57)
PKKRRKKK
PolyR NLS:
(SEQ ID NO: 58)
RRRRRRR
H2B NLS:
(SEQ ID NO: 59)
KKRKRSRK

[0543] In addition, in some examples, one or more peptide linkers were included between peptides or protein domains:

Rigid linker:
(SEQ ID NO: 334)
SGSETPGTSESATPEGS
GS linker 1:
(SEQ ID NO: 335)
GS
GS linker 2:
(SEQ ID NO: 336)
GGSG
GS linker 3:
(SEQ ID NO: 337)
GSGS
GS linker 4:
(SEQ ID NO: 338)
GGGS
GS linker 5:
(SEQ ID NO: 339)
GGSGGG
GS linker 6:
(SEQ ID NO: 340)
GSGSGSGS

[0544] SEQ ID NO: 1 illustrates an N-terminal CtIP fragment L2-2 fusion. The CtIP fragment is shown near the N-terminus of the engineered protein, fused via a XTEN linker (shown in bold italics text) to a C-terminal L2-2 protein (shown in underlined text). A nuclear localization sequence (shown in bold underlined lowercase text) is shown fused at the N-terminus of the CtIP fragment.

(SEQ ID NO: 1)
MAkkkrkvNISGSSCGSNSADTSSDFKDLWTKLKECHDREVQGLQ
VKVTKLKQERILDAQRLEEFFTKNQQLREQQKVLHETIKVLEDRL
RAGLCDRCAVTEEHMRKKQQEFENIRQQNLKLITELMNERNTLQE
ENKKLSEQLQQKIENDQQHQAAELECEEDVIDSITAFSFSGVNRL
RRKENHVRYIEQTHTKLEHSVCANEMRKVSKSSTHQHNNENEILV
ADTYDQSQSMAKAHGTSSYTDKSSFNLATVVAETLGLGVQEESET
QGMSLGDELYHCLEGNHKKQFESGSETGTSESATEGSCFLIVVIN
TRKTREVRCKRNHNLRSIHVSTISQLSLSVGLWNCQSAVNKADFI
TSIATYSDYNLMALTETWLREDTATHATLSANFSFSHTRQTGRGG
GTGLLISKEWKFTLISLTISSFEFHAVTIIHFYINVVVIYRGKLG
HFLDELDVLLSSFSNFDTLLVLGDENIYVDKQAADFQTLLASFDL
KRATSATHKSGNQLDLIYTRHCFTDQTIVTLQISDHFLLSLNIHI
TEHTTLVTFRRNLRSLSNRLSTIVSDSLSRKLTALDSNSATNTLC
STLASCLDRLCLASRARASAWLSDALREHRSKLRAAERIWRKTKN
AHLLTYQTLLSSFSAEVTSAKQTYYRLKINNAINRLLFKTFSSLL
YASSTLTTDDFATFFCTKTAKISAQFAATTNTQDTTTHTLTSFSQ
LSESEVSKLVLSSHATTCLDISHLLQAISAVITLTHIINTSLDSG
LFTTFKQARVTLLKKNLDHTLLENYRVSLLFMAKILEKVVENQVL
DELTQNNLMDNKQSGFKKGHSTETALLSVVEDLRLAKADSKSSVL
ILLDLSAAFDTVNHQILLSTLESLGVAGTVIQWERSYLSDRSFRV
SWRGEVSNLQHLNTGVQGSVLGLLFSIYTSSLGVIQRHGFSYHCY
ADDTQLYLSFHDDSVARISACLLDISHWMKDHHLQLNLAKTEMLV
VSANTLHHNFSIQMDGATITASKMVKSLGVTIDDQLNFSDHISRT
ARSCRFALYNIRKIRFLSEHAAQLLVQALVLSKLDYCNSLLALLA
NSIKLQLLQNAAARVVFNEKRAHVTLLVRLHWLVAARIKFKTLMF
AYKVTSGLASYLHSLLQIYVSRNLRSVNERRLVVSQRGKKSLSRT
LTLNLSWWNELNCIRTAESLAIFKKRLKTQLESLHFTS

[0545] SEQ ID NO: 2 illustrates an N-terminal RAD51 L2-2 fusion. The RAD51-derived protein is shown near the N-terminus of the engineered protein, fused via a linker (shown in bold italics text) to a C-terminal L2-2 protein (shown in underlined text). A nuclear localization sequence (shown in bold underlined lowercase text) is shown at the N-terminus of the engineered protein, fused to the RAD51-derived protein.

(SEQ ID NO: 2)
MAkkkrkvGIHGVAAAMQMQLEANADTSVEEESFGQISRLEQCGI
NANDVKKLEEAGFHTVEAVAYAKKELINIKGISEAKADKILAEAA
KLVMGETTETEFHQRRSEIIQITTGSKELDKLLQGGIETGSITEM
FGEFRTGKTQICHTLAVTCQLIDRGGGEGKAMYIDTEGTFRERLL
AVAERYGLSGSDVLDNVAYARAFNTDHQTQLLYQASAMMVESRYA
LLIVDSATALYRTDYSGRGELSARQMHLARFLRMLLRLADEFGVA
VVITNQVVAQVDGAAMFAADKKIGGNIIAHASTTRLYLRKGRGET
RICKIYDSCLEAEAMFAINADGVGDAKDGGSGSETGTSESATESG
GSGCFLIVVTNTRKTREVRCKRNHNLRSIHVSTISQLSLSVGLWN
CQSAVNKADFITSIATYSDYNLMALTETWLREDTATHATLSANFS
ESHTRQTGRGGGTGLLISKEWKFTLISLTISSFEFHAVTIIHFYI
NVVVIYRGKLGHFLDELDVLLSSFSNEDTLLVLGDFNIYVDKQAA
DFQTLLASFDLKRATSATHKSGNQLDLIYTRHCFTDQTIVTLQIS
DHFLLSLNIHITEHTTLVTERRNLRSLSNRLSTIVSDSLSRKLTA
LDSNSAINTLCSTLASCLDRLCLASRARASAWLSDALREHRSKLR
AAERIWRKTKNAHLLTYQTLLSSFSAEVTSAKQTYYRLKINNATN
RLLEKTFSSLLYASSTLTTDDFATFFCTKTAKISAQFAATTNTQD
TTTHTLTSFSQLSESEVSKLVLSSHATTCLDISHLLQAISAVITL
THIINTSLDSGLFTTFKQARVTLLKKNLDHTLLENYRVSLLFMAK
ILEKVVFNQVLDELTQNNLMDNKQSGFKKGHSTETALLSVVEDLR
LAKADSKSSVLILLDLSAAFDTVNHQILLSTLESLGVAGTVIQWE
RSYLSDRSFRVSWRGEVSNLQHLNTGVQGSVLGLLFSIYTSSLGV
IQRHGFSYHCYADDTQLYLSFHDDSVARISACLLDISHWMKDHHL
QLNLAKTEMLVVSANTLHHNESIQMDGATITASKMVKSLGVTIDD
QLNFSDHISRTARSCRFALYNIRKIRFLSEHAAQLLVQALVLSKL
DYCNSLLALLANSIKLQLLQNAAARVVFNEKRAHVTLLVRLHWLV
AARIKFKTLMFAYKVTSGLASYLHSLLQIYVSRNLRSVNERRLVV
SQRGKKSLSRTLTLNLSWWNELNCIRTAESLAIFKKRLKTQLFSL
HFTS

[0546] SEQ ID NO: 3 illustrates an N-terminal UL12 L2-2 fusion. The UL12 polypeptide is shown near the N-terminus of the engineered protein, fused via a linker (shown in bold italics text) to a C-terminal L2-2 protein (shown in underlined text). A nuclear localization sequence (shown in bold underlined lowercase text) is shown at the N-terminus of the engineered protein, fused to the UL12 polypeptide.

(SEQ ID NO: 3)
MAkkkrkvESTVGACGRTVTKRWALAEDTRGDSKRRNSLLITTFR
LQTTSAVDSSHSVNRDQHATDTADEKRAASALSDASGTDILSGGT
HARDDADDSDLDSGSETGTSESATESCFLIVVTNTRKTREVRCKR
NHNLRSIHVSTISQLSLSVGLWNCQSAVNKADFITSIATYSDYNL
MALTETWLREDTATHATLSANFSFSHTRQTGRGGGTGLLISKEWK
FTLISLTISSFEFHAVTIIHFYINVVVIYRGKLGHFLDELDVLLS
SFSNEDTLLVLGDFNIYVDKQAADFQTLLASFDLKRATSATHKSG
NQLDLIYTRHCFTDQTIVTLQISDHFLLSLNIHITEHTTLVTERR
NLRSLSNRLSTIVSDSLSRKLTALDSNSAINTLCSTLASCLDRLC
LASRARASAWLSDALREHRSKLRAAERIWRKTKNAHLLTYQTLLS
SFSAEVTSAKQTYYRLKINNATNRLLFKTFSSLLYASSTLTTDDF
ATFFCTKTAKISAQFAATTNTQDTTTHTLTSFSQLSESEVSKLVL
SSHATTCLDISHLLQAISAVITLTHIINTSLDSGLFTTFKQARVT
LLKKNLDHTLLENYRVSLLFMAKILEKVVENQVLDELTQNNLMDN
KQSGFKKGHSTETALLSVVEDLRLAKADSKSSVLILLDLSAAFDT
VNHQILLSTLESLGVAGTVIQWFRSYLSDRSFRVSWRGEVSNLQH
LNTGVQGSVLGLLFSIYTSSLGVIQRHGFSYHCYADDTQLYLSFH
DDSVARISACLLDISHWMKDHHLQLNLAKTEMLVVSANTLHHNFS
IQMDGATITASKMVKSLGVTIDDQLNFSDHISRTARSCRFALYNI
RKIRFLSEHAAQLLVQALVLSKLDYCNSLLALLANSIKLQLLQNA
AARVVFNEKRAHVTLLVRLHWLVAARIKFKTLMFAYKVTSGLASY
LHSLLQIYVSRNLRSVNERRLVVSQRGKKSLSRTLTLNLSWWNEL
NCIRTAESLAIFKKRLKTQLFSLHFTS

[0547] SEQ ID NO: 4 illustrates an N-terminal BRCA2-derived peptide L2-2 fusion. The BRCA2-derived peptide is shown near the N-terminus of the engineered protein, fused via a linker (shown in bold italics text) to a C-terminal L2-2 protein (shown in underlined text). A nuclear localization sequence (shown in bold underlined lowercase text) is shown at the N-terminus of the engineered protein, fused to the BRCA2-derived peptide.

(SEQ ID NO: 4)
MAkkkrkvTLLGFHTASGKKVKIAKESLDKVKNLFDEKEQGGSGG
GCFLIVVTNTRKTREVRCKRNHNLRSIHVSTISQLSLSVGLWNCQ
SAVNKADFITSIATYSDYNLMALTETWLREDTATHATLSANFSFS
HTRQTGRGGGTGLLISKEWKFTLISLTISSFEFHAVTIIHFYINV
VVIYRGKLGHFLDELDVLLSSFSNFDTLLVLGDFNIYVDKQAADF
QTLLASFDLKRATSATHKSGNQLDLIYTRHCFTDQTIVTLQISDH
FLLSLNIHITEHTTLVTERRNLRSLSNRLSTIVSDSLSRKLTALD
SNSATNTLCSTLASCLDRLCLASRARASAWLSDALREHRSKLRAA
ERIWRKTKNAHLLTYQTLLSSFSAEVTSAKQTYYRLKINNATNRL
LFKTESSLLYASSTLTTDDFATFFCTKTAKISAQFAATTNTQDTT
THTLTSFSQLSESEVSKLVLSSHATTCLDISHLLQAISAVITLTH
IINTSLDSGLFTTFKQARVTLLKKNLDHTLLENYRVSLLFMAKIL
EKVVFNQVLDELTQNNLMDNKQSGFKKGHSTETALLSVVEDLRLA
KADSKSSVLILLDLSAAFDTVNHQILLSTLESLGVAGTVIQWERS
YLSDRSFRVSWRGEVSNLQHLNTGVQGSVLGLLFSIYTSSLGVIQ
RHGFSYHCYADDTQLYLSFHDDSVARISACLLDISHWMKDHHLQL
NLAKTEMLVVSANTLHHNFSIQMDGATITASKMVKSLGVTIDDQL
NFSDHISRTARSCRFALYNIRKIRFLSEHAAQLLVQALVLSKLDY
CNSLLALLANSIKLQLLQNAAARVVENEKRAHVTLLVRLHWLVAA
RIKFKTLMFAYKVTSGLASYLHSLLQIYVSRNLRSVNERRLVVSQ
RGKKSLSRTLTLNLSWWNELNCIRTAESLAIFKKRLKTQLFSLHF
TS

[0548] SEQ ID NO: 5 illustrates an N-terminal DSS1-derived peptide L2-2 fusion. The DSS1-derived peptide is shown near the N-terminus of the engineered protein, fused via a linker (shown in bold italics text) to a C-terminal L2-2 protein (shown in underlined text). A nuclear localization sequence (shown in bold underlined lowercase text) is shown at the N-terminus of the engineered protein, fused to the N-terminus of the DSS1-derived peptide.

(SEQ ID NO: 5)
MAkkkrkvSEKKQVDLGLLEEDDEFEEFAEDWAGLDEDEDAHVWE
DNWDDDNVEDDFSNQLRAELEKHGYKMETSGGSGGGSGCFLIVVT
NTRKTREVRCKRNHNLRSIHVSTISQLSLSVGLWNCQSAVNKADF
ITSIATYSDYNLMALTETWLREDTATHATLSANFSFSHTRQTGRG
GGTGLLISKEWKFTLISLTISSFEFHAVTIIHFYINVVVIYRGKL
GHELDELDVLLSSFSNEDTLLVLGDFNIYVDKQAADFQTLLASFD
LKRATSATHKSGNQLDLIYTRHCFTDQTIVTLQISDHFLLSLNIH
ITEHTTLVTFRRNLRSLSNRLSTIVSDSLSRKLTALDSNSATNTL
CSTLASCLDRLCLASRARASAWLSDALREHRSKLRAAERIWRKTK
NAHLLTYQTLLSSFSAEVTSAKQTYYRLKINNATNRLLFKTESSL
LYASSTLTTDDFATFFCTKTAKISAQFAATTNTQDTTTHTLTSFS
QLSESEVSKLVLSSHATTCLDISHLLQAISAVITLTHIINTSLDS
GLFTTFKQARVTLLKKNLDHTLLENYRVSLLFMAKILEKVVFNQV
LDELTQNNLMDNKQSGFKKGHSTETALLSVVEDLRLAKADSKSSV
LILLDLSAAFDTVNHQILLSTLESLGVAGTVIQWERSYLSDRSFR
VSWRGEVSNLQHLNTGVQGSVLGLLFSIYTSSLGVIQRHGFSYHC
YADDTQLYLSFHDDSVARISACLLDISHWMKDHHLQLNLAKTEML
VVSANTLHHNESIQMDGATITASKMVKSLGVTIDDQLNFSDHISR
TARSCRFALYNIRKIRFLSEHAAQLLVQALVLSKLDYCNSLLALL
ANSIKLQLLQNAAARVVFNEKRAHVTLLVRLHWLVAARIKFKTLM
FAYKVTSGLASYLHSLLQIYVSRNLRSVNERRLVVSQRGKKSLSR
TLTLNLSWWNELNCIRTAESLAIFKKRLKTQLFSLHFTS

[0549] SEQ ID NO: 6 illustrates an N-terminal HMGN1 L2-2 fusion. A HMGN1 polypeptide is shown at the N-terminus of the engineered protein, fused via a linker (shown in bold italics text) to the N-terminus of the L2-2 protein (shown in underlined text).

(SEQ ID NO: 6)
MKRKVSSAEGAAKEEKRRSARLSAKAKVEAKKKAAAKDKSSDKKV
QTKGKRGAKGKQAEVANQETKEDLAENGETKTEESASDEAGEKEA
KSDSGSETGTSESATESCFLIVVTNTRKTREVRCKRNHNLRSIHV
STISQLSLSVGLWNCQSAVNKADFITSIATYSDYNLMALTETWLR
EDTATHATLSANFSFSHTRQTGRGGGTGLLISKEWKFTLISLTIS
SFEFHAVTIIHFYINVVVIYRGKLGHFLDELDVLLSSFSNFDTLL
VLGDFNIYVDKQAADFQTLLASFDLKRATSATHKSGNQLDLIYTR
HCFTDQTIVTLQISDHFLLSLNIHITEHTTLVTFRRNLRSLSNRL
STIVSDSLSRKLTALDSNSATNTLCSTLASCLDRLCLASRARASA
WLSDALREHRSKLRAAERIWRKTKNAHLLTYQTLLSSFSAEVTSA
KQTYYRLKINNATNRLLFKTFSSLLYASSTLTTDDFATFFCTKTA
KISAQFAATINTQDTTTHTLTSFSQLSESEVSKLVLSSHATTCLD
ISHLLQAISAVITLTHIINTSLDSGLFTTFKQARVTLLKKNLDHT
LLENYRVSLLFMAKILEKVVFNQVLDELTQNNLMDNKQSGFKKGH
STETALLSVVEDLRLAKADSKSSVLILLDLSAAFDTVNHQILLST
LESLGVAGTVIQWERSYLSDRSFRVSWRGEVSNLQHLNTGVQGSV
LGLLFSIYTSSLGVIQRHGFSYHCYADDTQLYLSFHDDSVARISA
CLLDISHWMKDHHLQLNLAKTEMLVVSANTLHHNFSIQMDGATIT
ASKMVKSLGVTIDDQLNFSDHISRTARSCRFALYNIRKIRFLSEH
AAQLLVQALVLSKLDYCNSLLALLANSIKLQLLQNAAARVVFNEK
RAHVTLLVRLHWLVAARIKFKTLMFAYKVTSGLASYLHSLLQIYV
SRNLRSVNERRLVVSQRGKKSLSRTLTLNLSWWNELNCIRTAESL
AIFKKRLKTQLFSLHFTS

[0550] SEQ ID NO: 7 illustrates a C-terminal HMGB1 L2-2 fusion. An HMGB1 polypeptide is shown near the C-terminus of the engineered protein, fused via a linker (shown in bold italics text) to a N-terminal L2-2 protein (shown in underlined text). A nuclear localization sequence (shown in bold underlined lowercase text) is shown at the C-terminus fused via a linker (shown in bold italics text) to the HMGB1 polypeptide.

(SEQ ID NO: 7)
MCFLIVVTNTRKTREVRCKRNHNLRSIHVSTISQLSLSVGLWNCQ
SAVNKADFITSIATYSDYNLMALTETWLREDTATHATLSANFSFS
HTRQTGRGGGTGLLISKEWKFTLISLTISSFEFHAVTIIHFYINV
VVIYRGKLGHELDELDVLLSSFSNEDTLLVLGDFNIYVDKQAADF
QTLLASFDLKRATSATHKSGNQLDLIYTRHCFTDQTIVTLQISDH
FLLSLNIHITEHTTLVTFRRNLRSLSNRLSTIVSDSLSRKLTALD
SNSATNTLCSTLASCLDRLCLASRARASAWLSDALREHRSKLRAA
ERIWRKTKNAHLLTYQTLLSSFSAEVTSAKQTYYRLKINNAINRL
LFKTFSSLLYASSTLTTDDFATFFCTKTAKISAQFAATTNTQDTT
THTLTSFSQLSESEVSKLVLSSHATTCLDISHLLQAISAVITLTH
IINTSLDSGLFTTEKQARVTLLKKNLDHTLLENYRVSLLFMAKIL
EKVVFNQVLDELTQNNLMDNKQSGFKKGHSTETALLSVVEDLRLA
KADSKSSVLILLDLSAAFDTVNHQILLSTLESLGVAGTVIQWERS
YLSDRSFRVSWRGEVSNLQHLNTGVQGSVLGLLFSIYTSSLGVIQ
RHGFSYHCYADDTQLYLSFHDDSVARISACLLDISHWMKDHHLQL
NLAKTEMLVVSANTLHHNFSIQMDGATITASKMVKSLGVTIDDQL
NFSDHISRTARSCRFALYNIRKIRFLSEHAAQLLVQALVLSKLDY
CNSLLALLANSIKLQLLQNAAARVVFNEKRAHVTLLVRLHWLVAA
RIKFKTLMFAYKVTSGLASYLHSLLQIYVSRNLRSVNERRLVVSQ
RGKKSLSRTLTLNLSWWNELNCIRTAESLAIFKKRLKTQLESLHF
TSSGSETGTSESATEGKGDKKRGKMSSYAFFVQTCREEHKKKHDA
SVNFSEFSKKCSERWKTMSAKEKGKFEDMAKADKARYEREMKTYI
KGEGGSGkrtadgsefeskkkrkv

[0551] SEQ ID NO: 8 illustrates a C-terminal Sto7d L2-2 fusion. A Sto7d DNA binding domain is shown near the C-terminus of the engineered protein, fused via a linker (shown in bold italics text) to a N-terminal L2-2 protein (shown in underlined text). A nuclear localization sequence (shown in bold underlined lowercase text) is shown at the C-terminus fused via a linker (shown in bold italics text) to the Sto7d DNA binding domain.

(SEQ ID NO: 8)
MCFLIVVTNTRKTREVRCKRNHNLRSIHVSTISQLSLSVGLWNCQ
SAVNKADFITSIATYSDYNLMALTETWLREDTATHATLSANFSFS
HTRQTGRGGGTGLLISKEWKFTLISLTISSFEFHAVTIIHFYINV
VVIYRGKLGHFLDELDVLLSSFSNEDTLLVLGDENIYVDKQAADF
QTLLASFDLKRATSATHKSGNQLDLIYTRHCFTDQTIVTLQISDH
FLLSLNIHITEHTTLVTFRRNLRSLSNRLSTIVSDSLSRKLTALD
SNSATNTLCSTLASCLDRLCLASRARASAWLSDALREHRSKLRAA
ERIWRKTKNAHLLTYQTLLSSFSAEVTSAKQTYYRLKINNAINRL
LFKTFSSLLYASSTLTTDDFATFFCTKTAKISAQFAATTNTQDTT
THTLTSFSQLSESEVSKLVLSSHATTCLDISHLLQAISAVITLTH
IINTSLDSGLFTTFKQARVTLLKKNLDHTLLENYRVSLLFMAKIL
EKVVENQVLDELTQNNLMDNKQSGFKKGHSTETALLSVVEDLRLA
KADSKSSVLILLDLSAAFDTVNHQILLSTLESLGVAGTVIQWFRS
YLSDRSFRVSWRGEVSNLQHLNTGVQGSVLGLLFSIYTSSLGVIQ
RHGFSYHCYADDTQLYLSFHDDSVARISACLLDISHWMKDHHLQL
NLAKTEMLVVSANTLHHNFSIQMDGATITASKMVKSLGVTIDDQL
NFSDHISRTARSCRFALYNIRKIRFLSEHAAQLLVQALVLSKLDY
CNSLLALLANSIKLQLLQNAAARVVFNEKRAHVTLLVRLHWLVAA
RIKFKTLMFAYKVTSGLASYLHSLLQIYVSRNLRSVNERRLVVSQ
RGKKSLSRTLTLNLSWWNELNCIRTAESLAIFKKRLKTQLESLHF
TSGGSGVTVKFKYKGEEKEVDISKIKKVWRVGKMISFTYDDNGKT
GRGAVSEKDAKELLQMLEKGGSGkrtadgsefeskkkrkv

[0552] SEQ ID NO: 9 illustrates a C-terminal Nibrin MRE11 recruitment peptide L2-2 fusion. The Nibrin MRE11 recruitment peptide is shown near the C-terminus of the engineered protein, fused via a linker (shown in bold italics text) to a N-terminal L2-2 protein (shown in underlined text). A nuclear localization sequence (shown in bold underlined lowercase text) is shown at the C-terminus fused via a linker (shown in bold italics text) to the Nibrin MRE11 recruitment peptide.

(SEQ ID NO: 9)
MCFLIVVTNTRKTREVRCKRNHNLRSIHVSTISQLSLSVGLWNCQ
SAVNKADFITSIATYSDYNLMALTETWLREDTATHATLSANFSFS
HTRQTGRGGGTGLLISKEWKFTLISLTISSFEFHAVTIIHFYINV
VVIYRGKLGHELDELDVLLSSFSNEDTLLVLGDFNIYVDKQAADF
QTLLASFDLKRATSATHKSGNQLDLIYTRHCFTDQTIVTLQISDH
FLLSLNIHITEHTTLVTFRRNLRSLSNRLSTIVSDSLSRKLTALD
SNSATNTLCSTLASCLDRLCLASRARASAWLSDALREHRSKLRAA
ERIWRKTKNAHLLTYQTLLSSFSAEVTSAKQTYYRLKINNAINRL
LFKTFSSLLYASSTLTTDDFATFFCTKTAKISAQFAATTNTQDTT
THTLTSFSQLSESEVSKLVLSSHATTCLDISHLLQAISAVITLTH
IINTSLDSGLFTTEKQARVTLLKKNLDHTLLENYRVSLLFMAKIL
EKVVENQVLDELTQNNLMDNKQSGFKKGHSTETALLSVVEDLRLA
KADSKSSVLILLDLSAAFDTVNHQILLSTLESLGVAGTVIQWERS
YLSDRSFRVSWRGEVSNLQHLNTGVQGSVLGLLFSIYTSSLGVIQ
RHGFSYHCYADDTQLYLSFHDDSVARISACLLDISHWMKDHHLQL
NLAKTEMLVVSANTLHHNFSIQMDGATITASKMVKSLGVTIDDQL
NFSDHISRTARSCRFALYNIRKIRFLSEHAAQLLVQALVLSKLDY
CNSLLALLANSIKLQLLQNAAARVVFNEKRAHVTLLVRLHWLVAA
RIKFKTLMFAYKVTSGLASYLHSLLQIYVSRNLRSVNERRLVVSQ
RGKKSLSRTLTLNLSWWNELNCIRTAESLAIFKKRLKTQLFSLHF
TSGSGSGSGSKNSTSRNSGINDDYGQLKNFKKFKKVTYGSkkkrk
v

[0553] SEQ ID NO: 10 illustrates a C-terminal MDM2 p53 inhibitory peptide L2-2 fusion. The MDM2 p53 inhibitory peptide is shown near the C-terminus of the engineered protein, fused via a linker (shown in bold italics text) to a N-terminal L2-2 protein (shown in underlined text). A nuclear localization sequence (shown in bold underlined lowercase text) is shown at the C-terminus fused via a linker (shown in bold italics text) to the MDM2 p53 inhibitory peptide.

(SEQ ID NO: 10)
MCFLIPVVTNTRKTREVRCKRNPHNLRSIHVSTISQLSLSVGLWN
CQSAVNKADFITSIATYSDYNLMALTETWLRPEDTATHATLSANF
SFSHTPRQTGRGGGTGLLISKEWKFTLIPSLPTISSFEFHAVTII
HPFYINVVVIYRPPGKLGHFLDELDVLLSSFSNEDTPLLVLGDFN
IYVDKPQAADFQTLLASFDLKRAPTSATHKSGNQLDLIYTRHCFT
DQTIVTPLQISDHFLLSLNIHITPEPPHTPTLVTFRRNLRSLSPN
RLSTIVSDSLPPSRKLTALDSNSAINTLCSTLASCLDRLCPLASR
PARASPPAPWLSDALREHRSKLRAAERIWRKTKNPAHLLTYQTLL
SSFSAEVTSAKQTYYRLKINNATNPRLLFKTESSLLYPPPPPASS
TLTTDDFATFFCTKTAKISAQFAAPTTNTQDTTPTPHTLISESQL
SESEVSKLVLSSHATTCPLDPIPSHLLQAISPAVIPTLTHIINTS
LDSGLFPTTFKQARVTPLLKKPNLDHTLLENYRPVSLLPFMAKIL
EKVVFNQVLDELTQNNLMDNKQSGFKKGHSTETALLSVVEDLRLA
KADSKSSVLILLDLSAAFDTVNHQILLSTLESLGVAGTVIQWERS
YLSDRSFRVSWRGEVSNLQHLNTGVPQGSVLGPLLFSIYTSSLGP
VIQRHGFSYHCYADDTQLYLSFHPDDPSVPARISACLLDISHWMK
DHHLQLNLAKTEMLVVSANPTLHHNFSIQMDGATITASKMVKSLG
VTIDDQLNFSDHISRTARSCRFALYNIRKIRPFLSEHAAQLLVQA
LVLSKLDYCNSLLALLPANSIKPLQLLQNAAARVVFNEPKRAHVT
PLLVRLHWLPVAARIKFKTLMFAYKVTSGLAPSYLHSLLQIYVPS
RNLRSVNERRLVVPSQRGKKSLSRTLTLNLPSWWNELPNCIRTAE
SLAIFKKRLKTQLESLHFTSGSGSGSGSCNTNMSVPTDGAVTTSQ
IPASEQETLVRPKPLLLKLLKSVGAQKDTYTMKEVLFYLGQYIMT
KRLYDEKQQHIVYCSNDLLGDLFGVPSFSVKEHRKIYTMIYRNLV
VVNQQESSDSGTSVSENGSpkkkrkv

[0554] SEQ ID NO: 11 illustrates a p53-inhibiting peptide L2-2 fusion. The p53-inhibiting peptide (YGFRLGFLHSGTAKSVTCTY; SEQ ID NO: 314) is shown near the C-terminus fused via a linker (shown in bold italics text) to a N-terminal L2-2 protein (shown in underlined text). A nuclear localization sequence (shown in bold underlined lowercase text) is shown at the C-terminus fused via a linker (shown in bold italics text) to the p53-inhibiting peptide.

(SEQ ID NO: 11)
MCFLIPVVTNTRKTREVRCKRNPHNLRSIHVSTISQLSLSVGLWN
CQSAVNKADFITSIATYSDYNLMALTETWLRPEDTATHATLSANF
SFSHTPRQTGRGGGTGLLISKEWKFTLIPSLPTISSFEFHAVTII
HPFYINVVVIYRPPGKLGHFLDELDVLLSSFSNEDTPLLVLGDFN
IYVDKPQAADFQTLLASFDLKRAPTSATHKSGNQLDLIYTRHCFT
DQTIVTPLQISDHFLLSLNIHITPEPPHTPTLVTFRRNLRSLSPN
RLSTIVSDSLPPSRKLTALDSNSAINTLCSTLASCLDRLCPLASR
PARASPPAPWLSDALREHRSKLRAAERIWRKTKNPAHLLTYQTLL
SSFSAEVTSAKQTYYRLKINNATNPRLLFKTFSSLLYPPPPPASS
TLTTDDFATFFCTKTAKISAQFAAPTTNTQDTTPTPHILISFSQL
SESEVSKLVLSSHATTCPLDPIPSHLLQAISPAVIPTLTHIINTS
LDSGLFPTTFKQARVTPLLKKPNLDHTLLENYRPVSLLPFMAKIL
EKVVFNQVLDFLTQNNLMDNKQSGFKKGHSTETALLSVVEDLRLA
KADSKSSVLILLDLSAAFDTVNHQILLSTLESLGVAGTVIQWERS
YLSDRSFRVSWRGEVSNLQHLNTGVPQGSVLGPLLFSIYTSSLGP
VIQRHGFSYHCYADDTQLYLSFHPDDPSVPARISACLLDISHWMK
DHHLQLNLAKTEMLVVSANPTLHHNFSIQMDGATITASKMVKSLG
VTIDDQLNFSDHISRTARSCRFALYNIRKIRPFLSEHAAQLLVQA
LVLSKLDYCNSLLALLPANSIKPLQLLQNAAARVVFNEPKRAHVT
PLLVRLHWLPVAARIKFKTLMFAYKVTSGLAPSYLHSLLQIYVPS
RNLRSVNERRLVVPSQRGKKSLSRTLTLNLPSWWNELPNCIRTAE
SLAIFKKRLKTQLESLHFTSGSGSGSGSGSYGFRLGFLHSGTAKS
VTCTYGSpkkkrkv

[0555] SEQ ID NO: 12 illustrates a Nanog-derived peptide L2-2 fusion. The Nanog-derived peptide is shown near the C-terminus fused via a linker (shown in bold italics text) to a N-terminal L2-2 protein (shown in underlined text). A nuclear localization sequence (shown in bold underlined lowercase text) is shown at the C-terminus fused via a linker (shown in bold italics text) to the Nanog-derived peptide.

(SEQ ID NO: 12)
MCFLIPVVTNTRKTREVRCKRNPHNLRSIHVSTISQLSLSVGLWN
CQSAVNKADFITSIATYSDYNLMALTETWLRPEDTATHATLSANF
SFSHTPRQTGRGGGTGLLISKEWKFTLIPSLPTISSFEFHAVTII
HPFYINVVVIYRPPGKLGHFLDELDVLLSSFSNEDTPLLVLGDEN
IYVDKPQAADFQTLLASFDLKRAPTSATHKSGNQLDLIYTRHCFT
DQTIVTPLQISDHFLLSLNIHITPEPPHTPTLVTFRRNLRSLSPN
RLSTIVSDSLPPSRKLTALDSNSATNTLCSTLASCLDRLCPLASR
PARASPPAPWLSDALREHRSKLRAAERIWRKTKNPAHLLTYQTLL
SSFSAEVTSAKQTYYRLKINNATNPRLLFKTFSSLLYPPPPPASS
TLTTDDFATFFCTKTAKISAQFAAPTTNTQDTTPTPHTLISESQL
SESEVSKLVLSSHATTCPLDPIPSHLLQAISPAVIPTLTHIINTS
LDSGLFPTTEKQARVTPLLKKPNLDHTLLENYRPVSLLPFMAKIL
EKVVFNQVLDELTQNNLMDNKQSGFKKGHSTETALLSVVEDLRLA
KADSKSSVLILLDLSAAFDTVNHQILLSTLESLGVAGTVIQWERS
YLSDRSFRVSWRGEVSNLQHLNTGVPQGSVLGPLLFSIYTSSLGP
VIQRHGFSYHCYADDTQLYLSFHPDDPSVPARISACLLDISHWMK
DHHLQLNLAKTEMLVVSANPTLHHNFSIQMDGATITASKMVKSLG
VTIDDQLNFSDHISRTARSCRFALYNIRKIRPFLSEHAAQLLVQA
LVLSKLDYCNSLLALLPANSIKPLQLLQNAAARVVFNEPKRAHVT
PLLVRLHWLPVAARIKEKTLMFAYKVTSGLAPSYLHSLLQIYVPS
RNLRSVNERRLVVPSQRGKKSLSRTLTLNLPSWWNELPNCIRTAE
SLAIFKKRLKTQLESLHFTSGSGSGSGSSLQSCMQFQPNSPASDL
EAALEAAGEGLNVIQQTTRYFSTPQTMDLFLNYSMNMQPEDVGSp
kkkrkv

[0556] SEQ ID NO: 13 illustrates an E. coli RNase H1 domain L2-2 fusion. The E. coli RNase H1 domain is shown near the C-terminus fused via a linker (shown in bold italics text) to a N-terminal L2-2 protein (shown in underlined text). A nuclear localization sequence (shown in bold underlined lowercase text) is shown at the C-terminus fused via a linker (shown in bold italics text) to the E. coli RNase H1 domain.

(SEQ ID NO: 13)
MCFLIPVVTNTRKTREVRCKRNPHNLRSIHVSTISQLSLSVGLWN
CQSAVNKADFITSIATYSDYNLMALTETWLRPEDTATHATLSANF
SFSHTPRQTGRGGGTGLLISKEWKFTLIPSLPTISSFEFHAVTII
HPFYINVVVIYRPPGKLGHFLDELDVLLSSFSNEDTPLLVLGDFN
IYVDKPQAADFQTLLASFDLKRAPTSATHKSGNQLDLIYTRHCFT
DQTIVTPLQISDHFLLSLNIHITPEPPHTPTLVTFRRNLRSLSPN
RLSTIVSDSLPPSRKLTALDSNSATNTLCSTLASCLDRLCPLASR
PARASPPAPWLSDALREHRSKLRAAERIWRKTKNPAHLLTYQTLL
SSFSAEVTSAKQTYYRLKINNATNPRLLFKTFSSLLYPPPPPASS
TLTTDDFATFFCTKTAKISAQFAAPTTNTQDTTPTPHTLTSFSQL
SESEVSKLVLSSHATTCPLDPIPSHLLQAISPAVIPTLTHIINTS
LDSGLFPTTFKQARVTPLLKKPNLDHTLLENYRPVSLLPFMAKIL
EKVVENQVLDELTQNNLMDNKQSGFKKGHSTETALLSVVEDLRLA
KADSKSSVLILLDLSAAFDTVNHQILLSTLESLGVAGTVIQWFRS
YLSDRSFRVSWRGEVSNLQHLNTGVPQGSVLGPLLFSIYTSSLGP
VIQRHGFSYHCYADDTQLYLSFHPDDPSVPARISACLLDISHWMK
DHHLQLNLAKTEMLVVSANPTLHHNFSIQMDGATITASKMVKSLG
VTIDDQLNFSDHISRTARSCRFALYNIRKIRPFLSEHAAQLLVQA
LVLSKLDYCNSLLALLPANSIKPLQLLQNAAARVVFNEPKRAHVT
PLLVRLHWLPVAARIKFKTLMFAYKVTSGLAPSYLHSLLQIYVPS
RNLRSVNERRLVVPSQRGKKSLSRTLTLNLPSWWNELPNCIRTAE
SLAIFKKRLKTQLESLHFTSGSGSGSGSLKQVEIFTDGSCLGNPG
PGGYGAILRYRGREKTFSAGYTRTTNNRMELMAAIVALEALKEHC
EVILSTDSQYVRQGITQWIHNWKKRGWKTADKKPVKNVDLWQRLD
AALGQHQIKWEWVKGHAGHPENERCDELARAAAMNPTLEDTGYQV
EVGSpkkkrkv

[0557] SEQ ID NO: 14 illustrates a human RNase H1 catalytic domain L2-2 fusion. The human RNaseH1 catalytic domain is shown near the C-terminus fused via a linker (shown in bold italics text) to a N-terminal L2-2 protein (shown in underlined text). A nuclear localization sequence (shown in bold underlined lowercase text) is shown at the C-terminus fused via a linker (shown in bold italics text) to the human RNase H1 catalytic domain.

(SEQ ID NO: 14)
MCFLIPVVINTRKTREVRCKRNPHNLRSIHVSTISQLSLSVGLWN
CQSAVNKADFITSIATYSDYNLMALTETWLRPEDTATHATLSANF
SFSHTPRQTGRGGGTGLLISKEWKFTLIPSLPTISSFEFHAVTII
HPFYINVVVIYRPPGKLGHFLDELDVLLSSFSNEDTPLLVLGDFN
IYVDKPQAADFQTLLASFDLKRAPTSATHKSGNQLDLIYTRHCFT
DQTIVTPLQISDHFLLSLNIHITPEPPHTPTLVTFRRNLRSLSPN
RLSTIVSDSLPPSRKLTALDSNSAINTLCSTLASCLDRLCPLASR
PARASPPAPWLSDALREHRSKLRAAERIWRKTKNPAHLLTYQTLL
SSFSAEVTSAKQTYYRLKINNATNPRLLFKTFSSLLYPPPPPASS
TLTTDDFATFFCTKTAKISAQFAAPTINTQDTTPTPHTLTSFSQL
SESEVSKLVLSSHATTCPLDPIPSHLLQAISPAVIPTLTHIINTS
LDSGLFPTTFKQARVTPLLKKPNLDHTLLENYRPVSLLPFMAKIL
EKVVFNQVLDFLTQNNLMDNKQSGFKKGHSTETALLSVVEDLRLA
KADSKSSVLILLDLSAAFDTVNHQILLSTLESLGVAGTVIQWFRS
YLSDRSFRVSWRGEVSNLQHLNTGVPQGSVLGPLLFSIYTSSLGP
VIQRHGFSYHCYADDTQLYLSFHPDDPSVPARISACLLDISHWMK
DHHLQLNLAKTEMLVVSANPTLHHNFSIQMDGATITASKMVKSLG
VTIDDQLNFSDHISRTARSCRFALYNIRKIRPFLSEHAAQLLVQA
LVLSKLDYCNSLLALLPANSIKPLQLLQNAAARVVFNEPKRAHVT
PLLVRLHWLPVAARIKFKTLMFAYKVTSGLAPSYLHSLLQIYVPS
RNLRSVNERRLVVPSQRGKKSLSRTLTLNLPSWWNELPNCIRTAE
SLAIFKKRLKTQLFSLHFTSGSGSGSGSGSGDFVVVYTDGCCSSN
GRRRPRAGIGVYWGPGHPLNVGIRLPGRQTNQRAEIHAACKAIEQ
AKTQNINKLVLYTDSMFTINGITNWVQGWKKNGWKTSAGKEVINK
EDFVALERLTQGMDIQWMHVPGHSGFIGNEEADRLAREGAKQSED
GSpkkkrkv

[0558] SEQ ID NO: 15 illustrates a Zinc finger targeting AAVS1 safe harbor L2-2 fusion. The Zinc finger targeting AAVS1 safe harbor is shown near the N-terminus of the engineered protein fused to a C-terminal L2-2 protein (shown in underlined text). A nuclear localization sequence (shown in bold underlined lowercase text) is shown at the N-terminus of the engineered protein fused to the Zinc finger targeting AAVS1 safe harbor.

(SEQ ID NO: 15)
MApkkkrkvGIHGVPAAMAERPFQCRICMRNFSYNWHLQRHIRTH
TGEKPFACDICGRKFARSDHLTTHTKIHTGSQKPFQCRICMRNFS
HNYARDCHIRTHTGEKPFACDICGRKFAQNSTRIGHTKIHLRGSS
GSETPGTSESATPEGIHGVPAAMAERPFQCRICMRNFSQSSNLAR
HIRTHTGEKPFACDICGRKFARTDYLVDHTKIHTGSQKPFQCRIC
MRNFSYNTHLTRHIRTHTGEKPFACDICGRKFAQGYNLAGHTKIH
LRGSSGSETPGTSESATPECFLIPVVINTRKTREVRCKRNPHNLR
SIHVSTISQLSLSVGLWNCQSAVNKADFITSIATYSDYNLMALTE
TWLRPEDTATHATLSANFSFSHTPRQTGRGGGTGLLISKEWKFTL
IPSLPTISSFEFHAVTIIHPFYINVVVIYRPPGKLGHFLDELDVL
LSSFSNFDTPLLVLGDFNIYVDKPQAADFQTLLASFDLKRAPTSA
THKSGNQLDLIYTRHCFTDQTIVTPLQISDHFLLSLNIHITPEPP
HTPTLVTERRNLRSLSPNRLSTIVSDSLPPSRKLTALDSNSATNT
LCSTLASCLDRLCPLASRPARASPPAPWLSDALREHRSKLRAAER
IWRKTKNPAHLLTYQTLLSSFSAEVTSAKQTYYRLKINNATNPRL
LFKTFSSLLYPPPPPASSTLTTDDFATFFCTKTAKISAQFAAPTT
NTQDTTPTPHTLTSFSQLSESEVSKLVLSSHATTCPLDPIPSHLL
QAISPAVIPTLTHIINTSLDSGLFPTTFKQARVTPLLKKPNLDHT
LLENYRPVSLLPFMAKILEKVVFNQVLDFLTQNNLMDNKQSGFKK
GHSTETALLSVVEDLRLAKADSKSSVLILLDLSAAFDTVNHQILL
STLESLGVAGTVIQWERSYLSDRSFRVSWRGEVSNLQHLNTGVPQ
GSVLGPLLFSIYTSSLGPVIQRHGFSYHCYADDTQLYLSFHPDDP
SVPARISACLLDISHWMKDHHLQLNLAKTEMLVVSANPTLHHNFS
IQMDGATITASKMVKSLGVTIDDQLNFSDHISRTARSCRFALYNI
RKIRPFLSEHAAQLLVQALVLSKLDYCNSLLALLPANSIKPLQLL
QNAAARVVFNEPKRAHVTPLLVRLHWLPVAARIKFKTLMFAYKVT
SGLAPSYLHSLLQIYVPSRNLRSVNERRLVVPSQRGKKSLSRTLT
LNLPSWWNELPNCIRTAESLAIFKKRLKTQLFSLHFTS

[0559] SEQ ID NO: 16 illustrates a dead Cas9 L2-2 fusion. The Cas9 portion is shown at the N-terminus of the engineered protein fused via a linker (shown in bold italics text) to a C-terminal L2-2 protein (shown in underlined text). A nuclear localization sequence (shown in bold underlined lowercase text) is shown at the N-terminus of the engineered protein fused to the Cas9 portion.

(SEQ ID NO: 16)
MApkkkrkvGRGMDKKYSIGLAIGTNSVGWAVITDEYKVPSKKFK
VLGNTDRHSIKKNLIGALLFDSGETAEATRLKRTARRRYTRRKNR
ICYLQEIFSNEMAKVDDSFFHRLEESFLVEEDKKHERHPIFGNIV
DEVAYHEKYPTIYHLRKKLVDSTDKADLRLIYLALAHMIKERGHF
LIEGDLNPDNSDVDKLFIQLVQTYNQLFEENPINASGVDAKAILS
ARLSKSRRLENLIAQLPGEKKNGLFGNLIALSLGLTPNFKSNEDL
AEDAKLQLSKDTYDDDLDNLLAQIGDQYADLFLAAKNLSDAILLS
DILRVNTEITKAPLSASMIKRYDEHHQDLTLLKALVRQQLPEKYK
EIFFDQSKNGYAGYIDGGASQEEFYKFIKPILEKMDGTEELLVKL
NREDLLRKQRTFDNGSIPHQIHLGELHAILRRQEDFYPFLKDNRE
KIEKILTFRIPYYVGPLARGNSRFAWMTRKSEETITPWNFEEVVD
KGASAQSFIERMINEDKNLPNEKVLPKHSLLYEYFTVYNELTKVK
YVTEGMRKPAFLSGEQKKAIVDLLEKTNRKVTVKQLKEDYFKKIE
CFDSVEISGVEDRFNASLGTYHDLLKIIKDKDFLDNEENEDILED
IVLTLTLFEDREMIEERLKTYAHLFDDKVMKQLKRRRYTGWGRLS
RKLINGIRDKQSGKTILDELKSDGFANRNFMQLIHDDSLTFKEDI
QKAQVSGQGDSLHEHIANLAGSPAIKKGILQTVKVVDELVKVMGR
HKPENIVIEMARENQTTQKGQKNSRERMKRIEEGIKELGSQILKE
HPVENTQLQNEKLYLYYLQNGRDMYVDQELDINRLSDYDVDAIVP
QSFLKDDSIDNKVLTRSDKNRGKSDNVPSEEVVKKMKNYWRQLLN
AKLITQRKFDNLTKAERGGLSELDKAGFIKRQLVETRQITKHVAQ
ILDSRMNTKYDENDKLIREVKVITLKSKLVSDFRKDFQFYKVREI
NNYHHAHDAYLNAVVGTALIKKYPKLESEFVYGDYKVYDVRKMIA
KSEQEIGKATAKYFFYSNIMNFFKTEITLANGEIRKRPLIEINGE
TGEIVWDKGRDFATVRKVLSMPQVNIVKKTEVQTGGFSKESILPK
RNSDKLIARKKDWDPKKYGGFDSPTVAYSVLVVAKVEKGKSKKLK
SVKELLGITIMERSSFEKNPIDFLEAKGYKEVKKDLIIKLPKYSL
FELENGRKRMLASAGELQKGNELALPSKYVNFLYLASHYEKLKGS
PEDNEQKQLFVEQHKHYLDEIIEQISEFSKRVILADANLDKVLSA
YNKHRDKPIREQAENIIHLFTLTNLGAPAAFKYFDTTIDRKRYTS
TKEVLDATLIHQSITGLYETRIDLSQLGGDGGSGSETPGTSESAT
PESGGSGCFLIPVVTNTRKTREVRCKRNPHNLRSIHVSTISQLSL
SVGLWNCQSAVNKADFITSIATYSDYNLMALTETWLRPEDTATHA
TLSANFSFSHTPRQTGRGGGTGLLISKEWKFTLIPSLPTISSFEF
HAVTIIHPFYINVVVIYRPPGKLGHFLDELDVLLSSFSNFDTPLL
VLGDFNIYVDKPQAADFQTLLASFDLKRAPTSATHKSGNQLDLIY
TRHCFTDQTIVTPLQISDHFLLSLNIHITPEPPHTPTLVTFRRNL
RSLSPNRLSTIVSDSLPPSRKLTALDSNSATNTLCSTLASCLDRL
CPLASRPARASPPAPWLSDALREHRSKLRAAERIWRKTKNPAHLL
TYQTLLSSFSAEVTSAKQTYYRLKINNATNPRLLFKTFSSLLYPP
PPPASSTLTTDDFATFFCTKTAKISAQFAAPTTNTQDTTPTPHTL
TSFSQLSESEVSKLVLSSHATTCPLDPIPSHLLQAISPAVIPTLT
HIINTSLDSGLFPTTFKQARVTPLLKKPNLDHTLLENYRPVSLLP
FMAKILEKVVFNQVLDELTQNNLMDNKQSGFKKGHSTETALLSVV
EDLRLAKADSKSSVLILLDLSAAFDTVNHQILLSTLESLGVAGTV
IQWERSYLSDRSFRVSWRGEVSNLQHLNTGVPQGSVLGPLLFSIY
TSSLGPVIQRHGFSYHCYADDTQLYLSFHPDDPSVPARISACLLD
ISHWMKDHHLQLNLAKTEMLVVSANPTLHHNFSIQMDGATITASK
MVKSLGVTIDDQLNFSDHISRTARSCRFALYNIRKIRPFLSEHAA
QLLVQALVLSKLDYCNSLLALLPANSIKPLQLLQNAAARVVFNEP
KRAHVTPLLVRLHWLPVAARIKFKTLMFAYKVTSGLAPSYLHSLL
QIYVPSRNLRSVNERRLVVPSQRGKKSLSRTLTLNLPSWWNELPN
CIRTAESLAIFKKRLKTQLFSLHFTS

[0560] SEQ ID NO: 17 illustrates a PCSK9 homing endonuclease L2-2 D237A fusion. The PCSK9 homing endonuclease portion is shown near the N-terminus of the engineered protein, fused via a linker (shown in bold italics text) to a C-terminal L2-2 protein (shown in underlined text) having a D237A substitution. A nuclear localization sequence (shown in bold underlined lowercase text) is shown at the N-terminus of the engineered protein fused to the PCSK9 homing endonuclease.

(SEQ ID NO: 17)
MApkkkrkvNTKYNKEFLLYLAGFVDGDGSIFARIKPSQRSKFKH
KLHLVFAVYQKTQRRWELDKLVDEIGVGYVLDSGSVSFYSLSEIK
PLHNFLTQLQPFLKLKQKQANLVLKIIEQLPSAKESPDKFLEVCT
WVDQIAALNDSKTRKTTSETVRAVLDSLPGSVGGLSPSQASSAAS
SASSSPGSGISEALRAGAGSGTGYNKEFLLYLAGFVDGDGSIYAR
IKPVQRAKFKHELVLGFDVTQKTQRRWFLDKLVDEIGVGYVYDKG
SVSAYRLSQIKPLHNFLTQLQPFLKLKQKQANLVLKIIEQLPSAK
ESPDKFLEVCTWVDQIAALNDSKIRKTTSETVRAVLDSLSEKKKS
SPSGSETPGTSESATPECFLIPVVTNTRKTREVRCKRNPHNLRSI
HVSTISQLSLSVGLWNCQSAVNKADFITSIATYSDYNLMALTETW
LRPEDTATHATLSANFSFSHTPRQTGRGGGTGLLISKEWKFTLIP
SLPTISSFEFHAVTIIHPFYINVVVIYRPPGKLGHFLDELDVLLS
SFSNFDTPLLVLGDFNIYVDKPQAADFQTLLASFDLKRAPTSATH
KSGNQLDLIYTRHCFTDQTIVTPLQISAHFLLSLNIHITPEPPHT
PTLVTERRNLRSLSPNRLSTIVSDSLPPSRKLTALDSNSATNTLC
STLASCLDRLCPLASRPARASPPAPWLSDALREHRSKLRAAERIW
RKTKNPAHLLTYQTLLSSFSAEVTSAKQTYYRLKINNATNPRLLF
KTFSSLLYPPPPPASSTLTTDDFATFFCTKTAKISAQFAAPTINT
QDTTPTPHTLTSFSQLSESEVSKLVLSSHATTCPLDPIPSHLLQA
ISPAVIPTLTHIINTSLDSGLFPTTFKQARVTPLLKKPNLDHTLL
ENYRPVSLLPFMAKILEKVVENQVLDELTQNNLMDNKQSGFKKGH
STETALLSVVEDLRLAKADSKSSVLILLDLSAAFDTVNHQILLST
LESLGVAGTVIQWERSYLSDRSFRVSWRGEVSNLQHLNTGVPQGS
VLGPLLFSIYTSSLGPVIQRHGFSYHCYADDTQLYLSFHPDDPSV
PARISACLLDISHWMKDHHLQLNLAKTEMLVVSANPTLHHNFSIQ
MDGATITASKMVKSLGVTIDDQLNFSDHISRTARSCRFALYNIRK
IRPFLSEHAAQLLVQALVLSKLDYCNSLLALLPANSIKPLQLLQN
AAARVVFNEPKRAHVTPLLVRLHWLPVAARIKFKTLMFAYKVTSG
LAPSYLHSLLQIYVPSRNLRSVNERRLVVPSQRGKKSLSRTLTLN
LPSWWNELPNCIRTAESLAIFKKRLKTQLFSLHFTS

[0561] SEQ ID NO: 18 illustrates a PCSK9 homing endonuclease L2-2 endonuclease deleted fusion. The PCSK9 homing endonuclease portion is shown near the N-terminus of the engineered protein, fused via a linker (shown in bold italics text) to a C-terminal L2-2 protein (shown in underlined text) from which the endonuclease domain has been deleted. A nuclear localization sequence (shown in bold underlined lowercase text) is shown at the N-terminus fused the PCSK9 homing endonuclease.

(SEQ ID NO: 18)
MApkkkrkvNTKYNKEFLLYLAGFVDGDGSIFARIKPSQRSKFKH
KLHLVFAVYQKTQRRWFLDKLVDEIGVGYVLDSGSVSFYSLSEIK
PLHNFLTQLQPFLKLKQKQANLVLKIIEQLPSAKESPDKFLEVCT
WVDQIAALNDSKTRKTTSETVRAVLDSLPGSVGGLSPSQASSAAS
SASSSPGSGISEALRAGAGSGTGYNKEFLLYLAGFVDGDGSIYAR
IKPVQRAKFKHELVLGFDVTQKTQRRWFLDKLVDEIGVGYVYDKG
SVSAYRLSQIKPLHNFLTQLQPFLKLKQKQANLVLKIIEQLPSAK
ESPDKFLEVCTWVDQIAALNDSKIRKTTSETVRAVLDSLSEKKKS
SPSGSETPGTSESATPEPPHTPTLVTFRRNLRSLSPNRLSTIVSD
SLPPSRKLTALDSNSATNTLCSTLASCLDRLCPLASRPARASPPA
PWLSDALREHRSKLRAAERIWRKTKNPAHLLTYQTLLSSFSAEVT
SAKQTYYRLKINNATNPRLLFKTFSSLLYPPPPPASSTLTTDDFA
TFFCTKTAKISAQFAAPTTNTQDTTPTPHTLTSFSQLSESEVSKL
VLSSHATTCPLDPIPSHLLQAISPAVIPTLTHIINTSLDSGLFPT
TFKQARVTPLLKKPNLDHTLLENYRPVSLLPFMAKILEKVVFNQV
LDELTQNNLMDNKQSGFKKGHSTETALLSVVEDLRLAKADSKSSV
LILLDLSAAFDTVNHQILLSTLESLGVAGTVIQWERSYLSDRSFR
VSWRGEVSNLQHLNTGVPQGSVLGPLLFSIYTSSLGPVIQRHGFS
YHCYADDTQLYLSFHPDDPSVPARISACLLDISHWMKDHHLQLNL
AKTEMLVVSANPTLHHNFSIQMDGATITASKMVKSLGVTIDDQLN
FSDHISRTARSCRFALYNIRKIRPFLSEHAAQLLVQALVLSKLDY
CNSLLALLPANSIKPLQLLQNAAARVVFNEPKRAHVTPLLVRLHW
LPVAARIKFKTLMFAYKVTSGLAPSYLHSLLQIYVPSRNLRSVNE
RRLVVPSQRGKKSLSRTLTLNLPSWWNELPNCIRTAESLAIFKKR
LKTQLFSLHETS

[0562] SEQ ID NO: 19 illustrates a PCSK9 homing nickase (Q47E) L2-2 D237A fusion. The PCSK9 homing nickase portion is shown near the N-terminus of the engineered protein, fused via a linker (shown in bold italics text) to a C-terminal L2-2 protein having a D237A substitution (shown in underlined text). A nuclear localization sequence (shown in bold underlined lowercase text) is shown at the N-terminus fused to the PCSK9 homing nickase.

(SEQ ID NO: 19)
MApkkkrkvNTKYNKEFLLYLAGFVDGDGSIFARIKPSQRSKFKH
KLHLVFAVYEKTQRRWELDKLVDEIGVGYVLDSGSVSFYSLSEIK
PLHNELTQLQPFLKLKQKQANLVLKIIEQLPSAKESPDKFLEVCT
WVDQIAALNDSKTRKTTSETVRAVLDSLPGSVGGLSPSQASSAAS
SASSSPGSGISEALRAGAGSGTGYNKEFLLYLAGFVDGDGSIYAR
IKPVQRAKFKHELVLGFDVTQKTQRRWFLDKLVDEIGVGYVYDKG
SVSAYRLSQIKPLHNFLTQLQPFLKLKQKQANLVLKIIEQLPSAK
ESPDKFLEVCTWVDQIAALNDSKIRKTTSETVRAVLDSLSEKKKS
SPSGSETPGTSESATPECFLIPVVTNTRKTREVRCKRNPHNLRSI
HVSTISQLSLSVGLWNCQSAVNKADFITSIATYSDYNLMALTETW
LRPEDTATHATLSANFSFSHTPRQTGRGGGTGLLISKEWKFTLIP
SLPTISSFEFHAVTIIHPFYINVVVIYRPPGKLGHFLDELDVLLS
SFSNFDTPLLVLGDFNIYVDKPQAADFQTLLASEDLKRAPTSATH
KSGNQLDLIYTRHCFTDQTIVTPLQISAHFLLSLNIHITPEPPHT
PTLVTERRNLRSLSPNRLSTIVSDSLPPSRKLTALDSNSAINTLC
STLASCLDRLCPLASRPARASPPAPWLSDALREHRSKLRAAERIW
RKTKNPAHLLTYQTLLSSFSAEVTSAKQTYYRLKINNATNPRLLF
KTFSSLLYPPPPPASSTLTTDDFATFFCTKTAKISAQFAAPTTNT
QDTTPTPHTLTSFSQLSESEVSKLVLSSHATTCPLDPIPSHLLQA
ISPAVIPTLTHIINTSLDSGLFPTTFKQARVTPLLKKPNLDHTLL
ENYRPVSLLPFMAKILEKVVENQVLDELTQNNLMDNKQSGFKKGH
STETALLSVVEDLRLAKADSKSSVLILLDLSAAFDTVNHQILLST
LESLGVAGTVIQWERSYLSDRSFRVSWRGEVSNLQHLNTGVPQGS
VLGPLLFSIYTSSLGPVIQRHGFSYHCYADDTQLYLSFHPDDPSV
PARISACLLDISHWMKDHHLQLNLAKTEMLVVSANPTLHHNFSIQ
MDGATITASKMVKSLGVTIDDQLNFSDHISRTARSCRFALYNIRK
IRPFLSEHAAQLLVQALVLSKLDYCNSLLALLPANSIKPLQLLQN
AAARVVFNEPKRAHVTPLLVRLHWLPVAARIKFKTLMFAYKVTSG
LAPSYLHSLLQIYVPSRNLRSVNERRLVVPSQRGKKSLSRTLTLN
LPSWWNELPNCIRTAESLAIFKKRLKTQLFSLHFTS

[0563] SEQ ID NO: 20 illustrates a PCSK9 homing nickase (Q47E) L2-2 endonuclease deleted fusion. The PCSK9 homing portion is shown at the N-terminus of the engineered protein, fused via a linker (shown in bold italics text) to a C-terminal L2-2 protein from which the endonuclease domain has been deleted (shown in underlined text). A nuclear localization sequence (shown in bold underlined lowercase text) is shown at the N-terminus fused to the PCSK9 homing nickase.

(SEQ ID NO: 20)
MApkkkrkvNTKYNKEFLLYLAGFVDGDGSIFARIKPSQRSKFKH
KLHLVFAVYEKTQRRWELDKLVDEIGVGYVLDSGSVSFYSLSEIK
PLHNFLTQLQPFLKLKQKQANLVLKIIEQLPSAKESPDKFLEVCT
WVDQIAALNDSKIRKTTSETVRAVLDSLPGSVGGLSPSQASSAAS
SASSSPGSGISEALRAGAGSGTGYNKEFLLYLAGFVDGDGSIYAR
IKPVQRAKFKHELVLGFDVTQKTQRRWFLDKLVDEIGVGYVYDKG
SVSAYRLSQIKPLHNFLTQLQPFLKLKQKQANLVLKIIEQLPSAK
ESPDKFLEVCTWVDQIAALNDSKTRKTTSETVRAVLDSLSEKKKS
SPSGSETPGTSESATPEPPHTPTLVTFRRNLRSLSPNRLSTIVSD
SLPPSRKLTALDSNSATNTLCSTLASCLDRLCPLASRPARASPPA
PWLSDALREHRSKLRAAERIWRKTKNPAHLLTYQTLLSSFSAEVT
SAKQTYYRLKINNAINPRLLFKTFSSLLYPPPPPASSTLTTDDFA
TFFCTKTAKISAQFAAPTTNTQDTTPTPHILISFSQLSESEVSKL
VLSSHATTCPLDPIPSHLLQAISPAVIPTLTHIINTSLDSGLFPT
TFKQARVTPLLKKPNLDHTLLENYRPVSLLPFMAKILEKVVFNQV
LDELTQNNLMDNKQSGFKKGHSTETALLSVVEDLRLAKADSKSSV
LILLDLSAAFDTVNHQILLSTLESLGVAGTVIQWERSYLSDRSFR
VSWRGEVSNLQHLNTGVPQGSVLGPLLFSIYTSSLGPVIQRHGFS
YHCYADDTQLYLSFHPDDPSVPARISACLLDISHWMKDHHLQLNL
AKTEMLVVSANPTLHHNFSIQMDGATITASKMVKSLGVTIDDQLN
FSDHISRTARSCRFALYNIRKIRPFLSEHAAQLLVQALVLSKLDY
CNSLLALLPANSIKPLQLLQNAAARVVFNEPKRAHVTPLLVRLHW
LPVAARIKFKTLMFAYKVTSGLAPSYLHSLLQIYVPSRNLRSVNE
RRLVVPSQRGKKSLSRTLTLNLPSWWNELPNCIRTAESLAIFKKR
LKTQLFSLHFTS

[0564] SEQ ID NO: 21 illustrates a Cas9 nickase fused to an endonuclease-deleted L2-2. The Cas9 nickase portion is shown near the N-terminus of the engineered protein, fused via a linker (shown in bold italics text) to a C-terminal L2-2 protein from which the endonuclease domain has been deleted (shown in underlined text). A nuclear localization sequence (shown in bold underlined lowercase text) is shown at the N-terminus fused to the Cas9 nickase.

(SEQ ID NO: 21)
MkrtadgsefespkkkrkvDKKYSIGLDIGTNSVGWAVITDEYKV
PSKKFKVLGNTDRHSIKKNLIGALLFDSGETAEATRLKRTARRRY
TRRKNRICYLQEIFSNEMAKVDDSFFHRLEESFLVEEDKKHERHP
IFGNIVDEVAYHEKYPTIYHLRKKLVDSTDKADLRLIYLALAHMI
KERGHFLIEGDLNPDNSDVDKLFIQLVQTYNQLFEENPINASGVD
AKAILSARLSKSRRLENLIAQLPGEKKNGLFGNLIALSLGLTPNE
KSNFDLAEDAKLQLSKDTYDDDLDNLLAQIGDQYADLFLAAKNLS
DAILLSDILRVNTEITKAPLSASMIKRYDEHHQDLILLKALVRQQ
LPEKYKEIFFDQSKNGYAGYIDGGASQEEFYKFIKPILEKMDGTE
ELLVKLNREDLLRKQRTEDNGSIPHQIHLGELHAILRRQEDFYPF
LKDNREKIEKILTFRIPYYVGPLARGNSRFAWMTRKSEETITPWN
FEEVVDKGASAQSFIERMTNFDKNLPNEKVLPKHSLLYEYFTVYN
ELTKVKYVTEGMRKPAFLSGEQKKAIVDLLFKTNRKVTVKQLKED
YFKKIECFDSVEISGVEDRFNASLGTYHDLLKIIKDKDFLDNEEN
EDILEDIVLTLTLFEDREMIEERLKTYAHLFDDKVMKQLKRRRYT
GWGRLSRKLINGIRDKQSGKTILDFLKSDGFANRNFMQLIHDDSL
TFKEDIQKAQVSGQGDSLHEHIANLAGSPAIKKGILQTVKVVDEL
VKVMGRHKPENIVIEMARENQTTQKGQKNSRERMKRIEEGIKELG
SQILKEHPVENTQLQNEKLYLYYLQNGRDMYVDQELDINRLSDYD
VDAIVPQSFLKDDSIDNKVLTRSDKNRGKSDNVPSEEVVKKMKNY
WRQLLNAKLITQRKFDNLTKAERGGLSELDKAGFIKRQLVETRQI
TKHVAQILDSRMNTKYDENDKLIREVKVITLKSKLVSDFRKDFQF
YKVREINNYHHAHDAYLNAVVGTALIKKYPKLESEFVYGDYKVYD
VRKMIAKSEQEIGKATAKYFFYSNIMNFFKTEITLANGEIRKRPL
IEINGETGEIVWDKGRDFATVRKVLSMPQVNIVKKTEVQTGGFSK
ESILPKRNSDKLIARKKDWDPKKYGGFDSPTVAYSVLVVAKVEKG
KSKKLKSVKELLGITIMERSSFEKNPIDFLEAKGYKEVKKDLIIK
LPKYSLFELENGRKRMLASAGELQKGNELALPSKYVNFLYLASHY
EKLKGSPEDNEQKQLFVEQHKHYLDEIIEQISEFSKRVILADANL
DKVLSAYNKHRDKPIREQAENIIHLFTLINLGAPAAFKYFDTTID
RKRYTSTKEVLDATLIHQSITGLYETRIDLSQLGGDSGGSSGGSS
GSETPGTSESATPESSGGSSGGSSPPHTPTLVTFRRNLRSLSPNR
LSTIVSDSLPPSRKLTALDSNSATNTLCSTLASCLDRLCPLASRP
ARASPPAPWLSDALREHRSKLRAAERIWRKTKNPAHLLTYQTLLS
SFSAEVTSAKQTYYRLKINNATNPRLLFKTFSSLLYPPPPPASST
LTTDDFATFFCTKTAKISAQFAAPTTNTQDTTPTPHTLTSFSQLS
ESEVSKLVLSSHATTCPLDPIPSHLLQAISPAVIPTLTHIINTSL
DSGLFPTTFKQARVTPLLKKPNLDHTLLENYRPVSLLPFMAKILE
KVVFNQVLDFLTQNNLMDNKQSGFKKGHSTETALLSVVEDLRLAK
ADSKSSVLILLDLSAAFDTVNHQILLSTLESLGVAGTVIQWERSY
LSDRSFRVSWRGEVSNLQHLNTGVPQGSVLGPLLFSIYTSSLGPV
IQRHGFSYHCYADDTQLYLSFHPDDPSVPARISACLLDISHWMKD
HHLQLNLAKTEMLVVSANPTLHHNFSIQMDGATITASKMVKSLGV
TIDDQLNFSDHISRTARSCRFALYNIRKIRPFLSEHAAQLLVQAL
VLSKLDYCNSLLALLPANSIKPLQLLQNAAARVVFNEPKRAHVTP
LLVRLHWLPVAARIKFKTLMFAYKVTSGLAPSYLHSLLQIYVPSR
NLRSVNERRLVVPSQRGKKSLSRTLTLNLPSWWNELPNCIRTAES
LAIFKKRLKTQLFSLHFTS

[0565] SEQ ID NO: 22 illustrates a Cas9 nuclease fused to endonuclease-deleted L2-2. The Cas9 nuclease portion is shown near the N-terminus of the engineered protein, fused via a XTEN linker with additional GS sequences (shown in bold italics text) to a C-terminal L2-2 protein from which the endonuclease domain has been deleted (shown in underlined text). A nuclear localization sequence (shown in bold underlined lowercase text) is shown at the N-terminus fused to the Cas9 nuclease portion.

(SEQ ID NO: 22)
MkrtadgsefespkkkrkvDKKYSIGLDIGTNSVGWAVITDEYKV
PSKKFKVLGNTDRHSIKKNLIGALLFDSGETAEATRLKRTARRRY
TRRKNRICYLQEIFSNEMAKVDDSFFHRLEESELVEEDKKHERHP
IFGNIVDEVAYHEKYPTIYHLRKKLVDSTDKADLRLIYLALAHMI
KERGHFLIEGDLNPDNSDVDKLFIQLVQTYNQLFEENPINASGVD
AKAILSARLSKSRRLENLIAQLPGEKKNGLFGNLIALSLGLTPNE
KSNEDLAEDAKLQLSKDTYDDDLDNLLAQIGDQYADLFLAAKNLS
DAILLSDILRVNTEITKAPLSASMIKRYDEHHQDLTLLKALVRQQ
LPEKYKEIFFDQSKNGYAGYIDGGASQEEFYKFIKPILEKMDGTE
ELLVKLNREDLLRKQRTFDNGSIPHQIHLGELHAILRRQEDFYPF
LKDNREKIEKILTFRIPYYVGPLARGNSRFAWMTRKSEETITPWN
FEEVVDKGASAQSFIERMTNFDKNLPNEKVLPKHSLLYEYFTVYN
ELTKVKYVTEGMRKPAFLSGEQKKAIVDLLEKTNRKVTVKQLKED
YFKKIECFDSVEISGVEDRFNASLGTYHDLLKIIKDKDELDNEEN
EDILEDIVLTLTLFEDREMIEERLKTYAHLEDDKVMKQLKRRRYT
GWGRLSRKLINGIRDKQSGKTILDELKSDGFANRNFMQLIHDDSL
TFKEDIQKAQVSGQGDSLHEHIANLAGSPAIKKGILQTVKVVDEL
VKVMGRHKPENIVIEMARENQTTQKGQKNSRERMKRIEEGIKELG
SQILKEHPVENTQLQNEKLYLYYLQNGRDMYVDQELDINRLSDYD
VDHIVPQSFLKDDSIDNKVLTRSDKNRGKSDNVPSEEVVKKMKNY
WRQLLNAKLITQRKFDNLTKAERGGLSELDKAGFIKRQLVETRQI
TKHVAQILDSRMNTKYDENDKLIREVKVITLKSKLVSDERKDFQF
YKVREINNYHHAHDAYLNAVVGTALIKKYPKLESEFVYGDYKVYD
VRKMIAKSEQEIGKATAKYFFYSNIMNFFKTEITLANGEIRKRPL
IEINGETGEIVWDKGRDFATVRKVLSMPQVNIVKKTEVQTGGFSK
ESILPKRNSDKLIARKKDWDPKKYGGFDSPTVAYSVLVVAKVEKG
KSKKLKSVKELLGITIMERSSFEKNPIDFLEAKGYKEVKKDLIIK
LPKYSLFELENGRKRMLASAGELQKGNELALPSKYVNFLYLASHY
EKLKGSPEDNEQKQLFVEQHKHYLDEIIEQISEFSKRVILADANL
DKVLSAYNKHRDKPIREQAENIIHLFTLINLGAPAAFKYFDTTID
RKRYTSTKEVLDATLIHQSITGLYETRIDLSQLGGDSGGSSGGSS
GSETPGTSESATPESSGGSSGGSSPPHTPTLVTFRRNLRSLSPNR
LSTIVSDSLPPSRKLTALDSNSATNTLCSTLASCLDRLCPLASRP
ARASPPAPWLSDALREHRSKLRAAERIWRKTKNPAHLLTYQTLLS
SFSAEVISAKQTYYRLKINNATNPRLLFKTFSSLLYPPPPPASST
LTTDDFATFFCTKTAKISAQFAAPTTNTQDTTPTPHTLTSFSQLS
ESEVSKLVLSSHATTCPLDPIPSHLLQAISPAVIPTLTHIINTSL
DSGLFPTTFKQARVTPLLKKPNLDHTLLENYRPVSLLPFMAKILE
KVVENQVLDELTQNNLMDNKQSGFKKGHSTETALLSVVEDLRLAK
ADSKSSVLILLDLSAAFDTVNHQILLSTLESLGVAGTVIQWERSY
LSDRSFRVSWRGEVSNLQHLNTGVPQGSVLGPLLFSIYTSSLGPV
IQRHGFSYHCYADDTQLYLSFHPDDPSVPARISACLLDISHWMKD
HHLQLNLAKTEMLVVSANPTLHHNFSIQMDGATITASKMVKSLGV
TIDDQLNFSDHISRTARSCRFALYNIRKIRPFLSEHAAQLLVQAL
VLSKLDYCNSLLALLPANSIKPLQLLQNAAARVVFNEPKRAHVTP
LLVRLHWLPVAARIKFKTLMFAYKVTSGLAPSYLHSLLQIYVPSR
NLRSVNERRLVVPSQRGKKSLSRTLTLNLPSWWNELPNCIRTAES
LAIFKKRLKTQLFSLHFTS

[0566] Nucleic acids (e.g., RNA or DNA) encoding one or more of these proteins can be provided in cis or in trans along with a nucleic acid encoding a transgene (e.g., flanked by terminal sequences).

### Example 3

[0567] Nucleic acids were designed and produced to encode non-limiting examples of engineered fusion proteins comprising a ZFL2-2 protein fused to one or more C-terminal and/or N-terminal heterologous polypeptides. These were tested and evaluated using an experimental retrotransposition assay.

[0568] The following descriptions outline the components of several non-limiting examples of engineered proteins (driver) that were evaluated in transposition assays.
[0569] a) EX282: illustrates a ZFL2-2 driver protein with a C-terminal fusion of an NBN-derived polypeptide. The NBN-derived polypeptide is shown at the C-terminus fused via a linker (shown in bold italics text) to a N-terminal ZFL2-2 protein (shown in underlined text). A nuclear localization sequence (shown in bold underlined lowercase text) is shown at the C-terminus fused to a N-terminal Nibrin-derived polypeptide. The EX282 driver is encoded by the EX282 driver construct (SEQ ID NO: 28) EX282 amino acid sequence:

(SEQ ID NO: 27)
MCFLIPVVTNTRKTREVRCKRNPHNLRSIHVSTISQLSLSVGLWN
CQSAVNKADFITSIATYSDYNLMALTETWLRPEDTATHATLSANF
SFSHTPRQTGRGGGTGLLISKEWKFTLIPSLPTISSFEFHAVTII
HPFYINVVVIYRPPGKLGHFLDELDVLLSSFSNEDTPLLVLGDFN
IYVDKPQAADFQTLLASFDLKRAPTSATHKSGNQLDLIYTRHCFT
DQTIVTPLQISDHFLLSLNIHITPEPPHTPTLVTFRRNLRSLSPN
RLSTIVSDSLPPSRKLTALDSNSAINTLCSTLASCLDRLCPLASR
PARASPPAPWLSDALREHRSKLRAAERIWRKTKNPAHLLTYQTLL
SSFSAEVTSAKQTYYRLKINNAINPRLLFKTFSSLLYPPPPPASS
TLTTDDFATFFCTKTAKISAQFAAPTTNTQDTTPTPHTLTSFSQL
SESEVSKLVLSSHATTCPLDPIPSHLLQAISPAVIPTLTHIINTS
LDSGLFPTTFKQARVTPLLKKPNLDHTLLENYRPVSLLPFMAKIL
EKVVFNQVLDELTQNNLMDNKQSGFKKGHSTETALLSVVEDLRLA
KADSKSSVLILLDLSAAFDTVNHQILLSTLESLGVAGTVIQWERS
YLSDRSFRVSWRGEVSNLQHLNTGVPQGSVLGPLLFSIYTSSLGP
VIQRHGFSYHCYADDTQLYLSFHPDDPSVPARISACLLDISHWMK
DHHLQLNLAKTEMLVVSANPTLHHNFSIQMDGATITASKMVKSLG
VTIDDQLNFSDHISRTARSCRFALYNIRKIRPFLSEHAAQLLVQA
LVLSKLDYCNSLLALLPANSIKPLQLLQNAAARVVFNEPKRAHVT
PLLVRLHWLPVAARIKFKTLMFAYKVTSGLAPSYLHSLLQIYVPS
RNLRSVNERRLVVPSQRGKKSLSRTLTLNLPSWWNELPNCIRTAE
SLAIFKKRLKTQLESLHFTSGSGSGSGSKNSTSRNPSGINDDYGQ
LKNFKKFKKVTYGSpkkkrkv

[0570] b) EX284: illustrates a ZFL2-2 driver protein with an N-terminal fusion of an MDM2-derived polypeptide. The MDM2-derived polypeptide is shown at the N-terminus fused via a linker (shown in bold italics text) to a C-terminal ZFL2-2 protein (shown in underlined text). A nuclear localization sequence (shown in bold underlined lowercase text) is shown at the N-terminus fused via a linker (shown in bold italics text) to a C-terminal MDM2-derived polypeptide. The EX284 driver is encoded by the EX284 driver construct (SEQ ID NO: 30) EX284 amino acid sequence:

(SEQ ID NO: 29)
MApkkkrkvGRGCNTNMSVPTDGAVTTSQIPASEQETLVRPKPLL
LKLLKSVGAQKDTYTMKEVLFYLGQYIMTKRLYDEKQQHIVYCSN
DLLGDLFGVPSFSVKEHRKIYTMIYRNLVVVNQQESSDSGTSVSE
NSGSETPGTSESATPESCFLIPVVINTRKTREVRCKRNPHNLRSI
HVSTISQLSLSVGLWNCQSAVNKADFITSIATYSDYNLMALTETW
LRPEDTATHATLSANFSFSHTPRQTGRGGGTGLLISKEWKFTLIP
SLPTISSFEFHAVTIIHPFYINVVVIYRPPGKLGHFLDELDVLLS
SFSNFDTPLLVLGDFNIYVDKPQAADFQTLLASFDLKRAPTSATH
KSGNQLDLIYTRHCFTDQTIVTPLQISDHFLLSLNIHITPEPPHT
PTLVTFRRNLRSLSPNRLSTIVSDSLPPSRKLTALDSNSAINTLC
STLASCLDRLCPLASRPARASPPAPWLSDALREHRSKLRAAERIW
RKTKNPAHLLTYQTLLSSFSAEVTSAKQTYYRLKINNATNPRLLF
KTESSLLYPPPPPASSTLTTDDFATFFCTKTAKISAQFAAPTTNT
QDTTPTPHTLTSFSQLSESEVSKLVLSSHATTCPLDPIPSHLLQA
ISPAVIPTLTHIINTSLDSGLFPTTFKQARVTPLLKKPNLDHTLL
ENYRPVSLLPFMAKILEKVVFNQVLDELTQNNLMDNKQSGFKKGH
STETALLSVVEDLRLAKADSKSSVLILLDLSAAFDTVNHQILLST
LESLGVAGTVIQWERSYLSDRSFRVSWRGEVSNLQHLNTGVPQGS
VLGPLLFSIYTSSLGPVIQRHGFSYHCYADDTQLYLSFHPDDPSV
PARISACLLDISHWMKDHHLQLNLAKTEMLVVSANPTLHHNFSIQ
MDGATITASKMVKSLGVTIDDQLNFSDHISRTARSCRFALYNIRK
IRPFLSEHAAQLLVQALVLSKLDYCNSLLALLPANSIKPLQLLQN
AAARVVFNEPKRAHVTPLLVRLHWLPVAARIKFKTLMFAYKVTSG
LAPSYLHSLLQIYVPSRNLRSVNERRLVVPSQRGKKSLSRTLTLN
LPSWWNELPNCIRTAESLAIFKKRLKTQLFSLHFTS

[0571] c) EX584: illustrates a ZFL2-2 driver protein with a C-terminal fusion of a UL12 polypeptide. The UL12 polypeptide is shown at the C-terminus fused via a linker (shown in bold italics text) to a N-terminal ZFL2-2 protein (shown in underlined text). A nuclear localization sequence (shown in bold underlined lowercase text) is shown at the C-terminus fused via a linker (shown in bold italics text) to a N-terminal UL12 polypeptide. The EX584 driver is encoded by the EX584 driver construct (SEQ ID NO: 32).

### EX584 Amino Acid Sequence:

(SEQ ID NO: 31)
MCFLIPVVTNTRKTREVRCKRNPHNLRSIHVSTISQLSLSVGLWN
CQSAVNKADFITSIATYSDYNLMALTETWLRPEDTATHATLSANF
SFSHTPRQTGRGGGTGLLISKEWKFTLIPSLPTISSFEFHAVTII
HPFYINVVVIYRPPGKLGHELDELDVLLSSFSNEDTPLLVLGDFN
IYVDKPQAADFQTLLASFDLKRAPTSATHKSGNQLDLIYTRHCFT
DQTIVTPLQISDHFLLSLNIHITPEPPHTPTLVTFRRNLRSLSPN
RLSTIVSDSLPPSRKLTALDSNSATNTLCSTLASCLDRLCPLASR
PARASPPAPWLSDALREHRSKLRAAERIWRKTKNPAHLLTYQTLL
SSFSAEVTSAKQTYYRLKINNATNPRLLFKTFSSLLYPPPPPASS
TLTTDDFATFFCTKTAKISAQFAAPTTNTQDTTPTPHILISFSQL
SESEVSKLVLSSHATTCPLDPIPSHLLQAISPAVIPTLTHIINTS
LDSGLFPTTFKQARVTPLLKKPNLDHTLLENYRPVSLLPFMAKIL
EKVVFNQVLDELTQNNLMDNKQSGFKKGHSTETALLSVVEDLRLA
KADSKSSVLILLDLSAAFDTVNHQILLSTLESLGVAGTVIQWERS
YLSDRSFRVSWRGEVSNLQHLNTGVPQGSVLGPLLFSIYTSSLGP
VIQRHGFSYHCYADDTQLYLSFHPDDPSVPARISACLLDISHWMK
DHHLQLNLAKTEMLVVSANPTLHHNFSIQMDGATITASKMVKSLG
VTIDDQLNFSDHISRTARSCRFALYNIRKIRPFLSEHAAQLLVQA
LVLSKLDYCNSLLALLPANSIKPLQLLQNAAARVVFNEPKRAHVT
PLLVRLHWLPVAARIKFKTLMFAYKVTSGLAPSYLHSLLQIYVPS
RNLRSVNERRLVVPSQRGKKSLSRTLTLNLPSWWNELPNCIRTAE
SLAIFKKRLKTQLESLHFTSSGSETPGTSESATPEGSESTVGPAC
PPGRTVTKRPWALAEDTPRGPDSPPKRPRPNSLPLITTFRPLPPP
PQTTSAVDPSSHSPVNPPRDQHATDTADEKPRAASPALSDASGPP
TPDIPLSPGGTHARDPDADPDSPDLDSGGSGkrtadgsefespkk
krkv

[0572] d) EX586: illustrates a ZFL2-2 driver protein with an N647K mutation predicted to improve binding to RNA/DNA and a C-terminal fusion of a UL12 polypeptide. The UL12 polypeptide is shown at the C-terminus fused via a linker (shown in bold italics text) to a N-terminal ZFL2-2 protein (shown in underlined text). A nuclear localization sequence (shown in bold underlined lowercase text) is shown at the C-terminus fused via a linker (shown in bold italics text) to a N-terminal UL12 polypeptide. The EX586 driver is encoded by the EX586 driver construct (SEQ ID NO: 34).

### EX586 Amino Acid Sequence:

(SEQ ID NO: 33)
MCFLIPVVTNTRKTREVRCKRNPHNLRSIHVSTISQLSLSVGLWN
CQSAVNKADFITSIATYSDYNLMALTETWLRPEDTATHATLSANF
SFSHTPRQTGRGGGTGLLISKEWKFTLIPSLPTISSFEFHAVTII
HPFYINVVVIYRPPGKLGHFLDELDVLLSSFSNEDTPLLVLGDFN
IYVDKPQAADFQTLLASFDLKRAPTSATHKSGNQLDLIYTRHCFT
DQTIVTPLQISDHFLLSLNIHITPEPPHTPTLVTFRRNLRSLSPN
RLSTIVSDSLPPSRKLTALDSNSATNTLCSTLASCLDRLCPLASR
PARASPPAPWLSDALREHRSKLRAAERIWRKTKNPAHLLTYQTLL
SSFSAEVTSAKQTYYRLKINNATNPRLLFKTESSLLYPPPPPASS
TLTTDDFATFFCTKTAKISAQFAAPTTNTQDTTPTPHTLTSFSQL
SESEVSKLVLSSHATTCPLDPIPSHLLQAISPAVIPTLTHIINTS
LDSGLFPTTFKQARVTPLLKKPNLDHTLLENYRPVSLLPFMAKIL
EKVVFNQVLDELTQNNLMDNKQSGFKKGHSTETALLSVVEDLRLA
KADSKSSVLILLDLSAAFDTVNHQILLSTLESLGVAGTVIQWERS
YLSDRSFRVSWRGEVSKLQHLNTGVPQGSVLGPLLFSIYTSSLGP
VIQRHGFSYHCYADDTQLYLSFHPDDPSVPARISACLLDISHWMK
DHHLQLNLAKTEMLVVSANPTLHHNFSIQMDGATITASKMVKSLG
VTIDDQLNFSDHISRTARSCRFALYNIRKIRPFLSEHAAQLLVQA
LVLSKLDYCNSLLALLPANSIKPLQLLQNAAARVVFNEPKRAHVT
PLLVRLHWLPVAARIKFKTLMFAYKVTSGLAPSYLHSLLQIYVPS
RNLRSVNERRLVVPSQRGKKSLSRTLTLNLPSWWNELPNCIRTAE
SLAIFKKRLKTQLFSLHFTSSGSETPGTSESATPEGSESTVGPAC
PPGRTVTKRPWALAEDTPRGPDSPPKRPRPNSLPLITTFRPLPPP
PQTTSAVDPSSHSPVNPPRDQHATDTADEKPRAASPALSDASGPP
TPDIPLSPGGTHARDPDADPDSPDLDSGGSGkrtadgsefespkk
krkv

[0573] e) EX587: illustrates a ZFL2-2 driver protein with a C-terminal fusion of an Sto7D and a UL12 polypeptide. The Sto7D polypeptide is shown at the C-terminus fused via a linker (shown in bold italics text) to a N-terminal ZFL2-2 protein (shown in underlined text). The UL12 polypeptide is shown at the C-terminus fused via a linker (shown in bold italics text) to a N-terminal Sto7D polypeptide. A nuclear localization sequence (shown in bold underlined lowercase text) is shown at the C-terminus fused via a linker (shown in bold italics text) to a N-terminal UL12 polypeptide. The EX587 driver is encoded by the EX587 driver construct (SEQ ID NO: 36).

### EX587 Amino Acid Sequence:

(SEQ ID NO: 35)
MCFLIPVVTNTRKTREVRCKRNPHNLRSIHVSTISQLSLSVGLWN
CQSAVNKADFITSIATYSDYNLMALTETWLRPEDTATHATLSANF
SFSHTPRQTGRGGGTGLLISKEWKFTLIPSLPTISSFEFHAVTII
HPFYINVVVIYRPPGKLGHFLDELDVLLSSFSNEDTPLLVLGDFN
IYVDKPQAADFQTLLASFDLKRAPTSATHKSGNQLDLIYTRHCFT
DQTIVTPLQISDHFLLSLNIHITPEPPHTPTLVTFRRNLRSLSPN
RLSTIVSDSLPPSRKLTALDSNSATNTLCSTLASCLDRLCPLASR
PARASPPAPWLSDALREHRSKLRAAERIWRKTKNPAHLLTYQTLL
SSFSAEVTSAKQTYYRLKINNAINPRLLFKTESSLLYPPPPPASS
TLTTDDFATFFCTKTAKISAQFAAPTINTQDTTPTPHTLTSFSQL
SESEVSKLVLSSHATTCPLDPIPSHLLQAISPAVIPTLTHIINTS
LDSGLFPTTFKQARVTPLLKKPNLDHTLLENYRPVSLLPFMAKIL
EKVVFNQVLDFLTQNNLMDNKQSGFKKGHSTETALLSVVEDLRLA
KADSKSSVLILLDLSAAFDTVNHQILLSTLESLGVAGTVIQWERS
YLSDRSFRVSWRGEVSNLQHLNTGVPQGSVLGPLLFSIYTSSLGP
VIQRHGFSYHCYADDTQLYLSFHPDDPSVPARISACLLDISHWMK
DHHLQLNLAKTEMLVVSANPTLHHNFSIQMDGATITASKMVKSLG
VTIDDQLNFSDHISRTARSCRFALYNIRKIRPFLSEHAAQLLVQA
LVLSKLDYCNSLLALLPANSIKPLQLLQNAAARVVFNEPKRAHVT
PLLVRLHWLPVAARIKFKTLMFAYKVTSGLAPSYLHSLLQIYVPS
RNLRSVNERRLVVPSQRGKKSLSRTLTLNLPSWWNELPNCIRTAE
SLAIFKKRLKTQLFSLHFTSSGSETPGTSESATPEGSVTVKFKYK
GEEKEVDISKIKKVWRVGKMISFTYDDNGKTGRGAVSEKDAPKEL
LQMLEKSGSETPGTSESATPEGSESTVGPACPPGRTVTKRPWALA
EDTPRGPDSPPKRPRPNSLPLTTTFRPLPPPPQTTSAVDPSSHSP
VNPPRDQHATDTADEKPRAASPALSDASGPPTPDIPLSPGGTHAR
DPDADPDSPDLDSGGSGkrtadgsefespkkkrkv

[0574] f) EX594: illustrates a ZFL2-2 driver protein with a C-terminal fusion of a BRCA2-derived polypeptide. The BRCA2-derived polypeptide is shown at the C-terminus fused via a linker (shown in bold italics text) to a N-terminal ZFL2-2 protein (shown in underlined text). A nuclear localization sequence (shown in bold underlined lowercase text) is shown at the C-terminus fused via a linker (shown in bold italics text) to a N-terminal BRCA2-derived polypeptide. The EX594 driver is encoded by the EX594 driver construct (SEQ ID NO: 38).
[0575] g) EX594 amino acid sequence:

(SEQ ID NO: 37)
MCFLIPVVTNTRKTREVRCKRNPHNLRSIHVSTISQLSLSVGLWN
CQSAVNKADFITSIATYSDYNLMALTETWLRPEDTATHATLSANF
SFSHTPRQTGRGGGTGLLISKEWKFTLIPSLPTISSFEFHAVTII
HPFYINVVVIYRPPGKLGHFLDELDVLLSSFSNEDTPLLVLGDFN
IYVDKPQAADFQTLLASFDLKRAPTSATHKSGNQLDLIYTRHCFT
DQTIVTPLQISDHFLLSLNIHITPEPPHTPTLVTFRRNLRSLSPN
RLSTIVSDSLPPSRKLTALDSNSATNTLCSTLASCLDRLCPLASR
PARASPPAPWLSDALREHRSKLRAAERIWRKTKNPAHLLTYQTLL
SSFSAEVTSAKQTYYRLKINNATNPRLLFKTFSSLLYPPPPPASS
TLTTDDFATFFCTKTAKISAQFAAPTTNTQDTTPTPHTLTSFSQL
SESEVSKLVLSSHATTCPLDPIPSHLLQAISPAVIPTLTHIINTS
LDSGLFPTTFKQARVTPLLKKPNLDHTLLENYRPVSLLPFMAKIL
EKVVENQVLDELTQNNLMDNKQSGFKKGHSTETALLSVVEDLRLA
KADSKSSVLILLDLSAAFDTVNHQILLSTLESLGVAGTVIQWERS
YLSDRSFRVSWRGEVSNLQHLNTGVPQGSVLGPLLFSIYTSSLGP
VIQRHGFSYHCYADDTQLYLSFHPDDPSVPARISACLLDISHWMK
DHHLQLNLAKTEMLVVSANPTLHHNFSIQMDGATITASKMVKSLG
VTIDDQLNFSDHISRTARSCRFALYNIRKIRPFLSEHAAQLLVQA
LVLSKLDYCNSLLALLPANSIKPLQLLQNAAARVVFNEPKRAHVT
PLLVRLHWLPVAARIKFKTLMFAYKVTSGLAPSYLHSLLQIYVPS
RNLRSVNERRLVVPSQRGKKSLSRTLTLNLPSWWNELPNCIRTAE
SLAIFKKRLKTQLESLHFTSSGSETPGTSESATPEGSPTLLGFHT
ASGKKVKIAKESLDKVKNLFDEKEQGGSGkrtadgsefespkkkr
kv

[0576] h) EX595: illustrates a ZFL2-2 driver protein with an N-terminal fusion of an HMGN1 polypeptide, and a C-terminal fusion of an HMGB1 polypeptide. The HMGN1 polypeptide is shown at the N-terminus fused via a linker (shown in bold italics text) to a C-terminal ZFL2-2 protein (shown in underlined text). The HMGB1 polypeptide is shown at the C-terminus fused via a linker (shown in bold italics text) to a N-terminal ZFL2-2 protein (shown in underlined text). A nuclear localization sequence (shown in bold underlined lowercase text) is shown at the C-terminus fused via a linker (shown in bold italics text) to a N-terminal HMGB1 polypeptide. The EX595 driver is encoded by the EX595 driver construct (SEQ ID NO: 40).

### EX595 Amino Acid Sequence:

(SEQ ID NO: 39)
MPKRKVSSAEGAAKEEPKRRSARLSAKPPAKVEAKPKKAAAKDKS
SDKKVQTKGKRGAKGKQAEVANQETKEDLPAENGETKTEESPASD
EAGEKEAKSDSGSETPGTSESATPESCFLIPVVINTRKTREVRCK
RNPHNLRSIHVSTISQLSLSVGLWNCQSAVNKADFITSIATYSDY
NLMALTETWLRPEDTATHATLSANFSFSHTPRQTGRGGGTGLLIS
KEWKFTLIPSLPTISSFEFHAVTIIHPFYINVVVIYRPPGKLGHF
LDELDVLLSSFSNFDTPLLVLGDENIYVDKPQAADFQTLLASEDL
KRAPTSATHKSGNQLDLIYTRHCFTDQTIVTPLQISDHFLLSLNI
HITPEPPHTPTLVTERRNLRSLSPNRLSTIVSDSLPPSRKLTALD
SNSATNTLCSTLASCLDRLCPLASRPARASPPAPWLSDALREHRS
KLRAAERIWRKTKNPAHLLTYQTLLSSFSAEVTSAKQTYYRLKIN
NATNPRLLFKTESSLLYPPPPPASSTLTTDDFATFFCTKTAKISA
QFAAPTTNTQDTTPTPHTLTSFSQLSESEVSKLVLSSHATTCPLD
PIPSHLLQAISPAVIPTLTHIINTSLDSGLFPTTFKQARVTPLLK
KPNLDHTLLENYRPVSLLPFMAKILEKVVENQVLDELTQNNLMDN
KQSGFKKGHSTETALLSVVEDLRLAKADSKSSVLILLDLSAAFDT
VNHQILLSTLESLGVAGTVIQWERSYLSDRSFRVSWRGEVSNLQH
LNTGVPQGSVLGPLLFSIYTSSLGPVIQRHGFSYHCYADDTQLYL
SFHPDDPSVPARISACLLDISHWMKDHHLQLNLAKTEMLVVSANP
TLHHNFSIQMDGATITASKMVKSLGVTIDDQLNFSDHISRTARSC
RFALYNIRKIRPELSEHAAQLLVQALVLSKLDYCNSLLALLPANS
IKPLQLLQNAAARVVFNEPKRAHVTPLLVRLHWLPVAARIKFKTL
MFAYKVTSGLAPSYLHSLLQIYVPSRNLRSVNERRLVVPSQRGKK
SLSRTLTLNLPSWWNELPNCIRTAESLAIFKKRLKTQLFSLHFTS
SGSETPGTSESATPEGKGDPKKPRGKMSSYAFFVQTCREEHKKKH
PDASVNFSEFSKKCSERWKTMSAKEKGKFEDMAKADKARYEREMK
TYIPPKGEGGSGkrtadgsefespkkkrkv

[0577] i) EX596: illustrates a ZFL2-2 driver protein with an N-terminal fusion of an HMGN1 polypeptide, a C-terminal fusion of an HMGB1 polypeptide, and a C-terminal fusion of a UL12 polypeptide. The HMGN1 polypeptide is shown at the N-terminus fused via a linker (shown in bold italics text) to a C-terminal ZFL2-2 protein (shown in underlined text). The UL12 polypeptide is shown at the C-terminus fused via a linker (shown in bold italics text) to a N-terminal ZFL2-2 protein (shown in underlined text). The HMGB1 polypeptide is shown at the C-terminus fused via a linker (shown in bold italics text) to a C-terminal UL12 polypeptide. A nuclear localization sequence (shown in bold underlined lowercase text) is shown at the C-terminus fused via a linker (shown in bold italics text) to a N-terminal HMGB1 polypeptide. The EX596 driver is encoded by the EX596 driver construct (SEQ ID NO: 42).

### EX596 Amino Acid Sequence:

(SEQ ID NO: 41)
MPKRKVSSAEGAAKEEPKRRSARLSAKPPAKVEAKPKKAAAKDKS
SDKKVQTKGKRGAKGKQAEVANQETKEDLPAENGETKTEESPASD
EAGEKEAKSDSGSETPGTSESATPESCFLIPVVTNTRKTREVRCK
RNPHNLRSIHVSTISQLSLSVGLWNCQSAVNKADFITSIATYSDY
NLMALTETWLRPEDTATHATLSANFSFSHTPRQTGRGGGTGLLIS
KEWKFTLIPSLPTISSFEFHAVTIIHPFYINVVVIYRPPGKLGHF
LDELDVLLSSFSNFDTPLLVLGDENIYVDKPQAADFQTLLASEDL
KRAPTSATHKSGNQLDLIYTRHCFTDQTIVTPLQISDHFLLSLNI
HITPEPPHTPTLVTERRNLRSLSPNRLSTIVSDSLPPSRKLTALD
SNSAINTLCSTLASCLDRLCPLASRPARASPPAPWLSDALREHRS
KLRAAERIWRKTKNPAHLLTYQTLLSSFSAEVTSAKQTYYRLKIN
NATNPRLLFKTFSSLLYPPPPPASSTLTTDDFATFFCTKTAKISA
QFAAPTTNTQDTTPTPHTLTSFSQLSESEVSKLVLSSHATTCPLD
PIPSHLLQAISPAVIPTLTHIINTSLDSGLFPTTFKQARVTPLLK
KPNLDHTLLENYRPVSLLPFMAKILEKVVFNQVLDELTQNNLMDN
KQSGFKKGHSTETALLSVVEDLRLAKADSKSSVLILLDLSAAFDT
VNHQILLSTLESLGVAGTVIQWERSYLSDRSFRVSWRGEVSNLQH
LNTGVPQGSVLGPLLFSIYTSSLGPVIQRHGFSYHCYADDTQLYL
SFHPDDPSVPARISACLLDISHWMKDHHLQLNLAKTEMLVVSANP
TLHHNFSIQMDGATITASKMVKSLGVTIDDQLNFSDHISRTARSC
RFALYNIRKIRPFLSEHAAQLLVQALVLSKLDYCNSLLALLPANS
IKPLQLLQNAAARVVFNEPKRAHVTPLLVRLHWLPVAARIKFKTL
MFAYKVTSGLAPSYLHSLLQIYVPSRNLRSVNERRLVVPSQRGKK
SLSRTLTLNLPSWWNELPNCIRTAESLAIFKKRLKTQLFSLHFTS
SGSETPGTSESATPEGSESTVGPACPPGRTVTKRPWALAEDTPRG
PDSPPKRPRPNSLPLITTERPLPPPPQTTSAVDPSSHSPVNPPRD
QHATDTADEKPRAASPALSDASGPPTPDIPLSPGGTHARDPDADP
DSPDLDSSGSETPGTSESATPEGKGDPKKPRGKMSSYAFFVQTCR
EEHKKKHPDASVNFSEFSKKCSERWKTMSAKEKGKFEDMAKADKA
RYEREMKTYIPPKGEGGSGkrtadgsefespkkkrkv

[0578] j) EX597: illustrates a ZFL2-2 protein with a C-terminal fusion of a UL12 polypeptide followed by a Sto7D polypeptide. The UL12 polypeptide is shown at the C-terminus fused via a linker (shown in bold italics text) to a N-terminal ZFL2-2 protein (shown in underlined text). The Sto7D polypeptide is shown at the C-terminus fused via a linker (shown in bold italics text) to a N-terminal UL12 polypeptide. A nuclear localization sequence (shown in bold underlined lowercase text) is shown at the C-terminus fused via a linker (shown in bold italics text) to a N-terminal Sto7D polypeptide.

### EX597 Amino Acid Sequence:

(SEQ ID NO: 43)
MCFLIPVVINTRKTREVRCKRNPHNLRSIHVSTISQLSLSVGLWN
CQSAVNKADFITSIATYSDYNLMALTETWLRPEDTATHATLSANF
SFSHTPRQTGRGGGTGLLISKEWKFTLIPSLPTISSFEFHAVTII
HPFYINVVVIYRPPGKLGHFLDELDVLLSSFSNFDTPLLVLGDFN
IYVDKPQAADFQTLLASFDLKRAPTSATHKSGNQLDLIYTRHCFT
DQTIVTPLQISDHFLLSLNIHITPEPPHTPTLVTFRRNLRSLSPN
RLSTIVSDSLPPSRKLTALDSNSAINTLCSTLASCLDRLCPLASR
PARASPPAPWLSDALREHRSKLRAAERIWRKTKNPAHLLTYQTLL
SSFSAEVTSAKQTYYRLKINNAINPRLLFKTFSSLLYPPPPPASS
TLTTDDFATFFCTKTAKISAQFAAPTINTQDTTPTPHTLTSFSQL
SESEVSKLVLSSHATTCPLDPIPSHLLQAISPAVIPTLTHIINTS
LDSGLFPTTFKQARVTPLLKKPNLDHTLLENYRPVSLLPFMAKIL
EKVVENQVLDELTQNNLMDNKQSGFKKGHSTETALLSVVEDLRLA
KADSKSSVLILLDLSAAFDTVNHQILLSTLESLGVAGTVIQWERS
YLSDRSFRVSWRGEVSNLQHLNTGVPQGSVLGPLLFSIYTSSLGP
VIQRHGFSYHCYADDTQLYLSFHPDDPSVPARISACLLDISHWMK
DHHLQLNLAKTEMLVVSANPTLHHNFSIQMDGATITASKMVKSLG
VTIDDQLNFSDHISRTARSCRFALYNIRKIRPFLSEHAAQLLVQA
LVLSKLDYCNSLLALLPANSIKPLQLLQNAAARVVFNEPKRAHVT
PLLVRLHWLPVAARIKFKTLMFAYKVTSGLAPSYLHSLLQIYVPS
RNLRSVNERRLVVPSQRGKKSLSRTLTLNLPSWWNELPNCIRTAE
SLAIFKKRLKTQLESLHFTSSGSETPGTSESATPEGSESTVGPAC
PPGRTVTKRPWALAEDTPRGPDSPPKRPRPNSLPLITTFRPLPPP
PQTTSAVDPSSHSPVNPPRDQHATDTADEKPRAASPALSDASGPP
TPDIPLSPGGTHARDPDADPDSPDLDSSGSETPGTSESATPEGSV
TVKFKYKGEEKEVDISKIKKVWRVGKMISFTYDDNGKTGRGAVSE
KDAPKELLQMLEKGGSGkrtadgsefespkkkrkv

[0579] k) EX588: illustrates a ZFL2-2 protein (expressed from an RNA with a Kozak consensus sequence).

### EX588 Amino Acid Sequence:

(SEQ ID NO: 45)
MCFLIPVVINTRKTREVRCKRNPHNLRSIHVSTISQLSLSVGLWN
CQSAVNKADFITSIATYSDYNLMALTETWLRPEDTATHATLSANF
SFSHTPRQTGRGGGTGLLISKEWKFTLIPSLPTISSFEFHAVTII
HPFYINVVVIYRPPGKLGHFLDELDVLLSSFSNEDTPLLVLGDEN
IYVDKPQAADFQTLLASFDLKRAPTSATHKSGNQLDLIYTRHCFT
DQTIVTPLQISDHFLLSLNIHITPEPPHTPTLVTFRRNLRSLSPN
RLSTIVSDSLPPSRKLTALDSNSAINTLCSTLASCLDRLCPLASR
PARASPPAPWLSDALREHRSKLRAAERIWRKTKNPAHLLTYQTLL
SSFSAEVTSAKQTYYRLKINNAINPRLLFKTFSSLLYPPPPPASS
TLTTDDFATFFCTKTAKISAQFAAPTINTQDITPTPHILISFSQL
SESEVSKLVLSSHATTCPLDPIPSHLLQAISPAVIPTLTHIINTS
LDSGLFPTTFKQARVTPLLKKPNLDHTLLENYRPVSLLPFMAKIL
EKVVFNQVLDFLTQNNLMDNKQSGFKKGHSTETALLSVVEDLRLA
KADSKSSVLILLDLSAAFDTVNHQILLSTLESLGVAGTVIQWERS
YLSDRSFRVSWRGEVSNLQHLNTGVPQGSVLGPLLFSIYTSSLGP
VIQRHGFSYHCYADDTQLYLSFHPDDPSVPARISACLLDISHWMK
DHHLQLNLAKTEMLVVSANPTLHHNFSIQMDGATITASKMVKSLG
VTIDDQLNFSDHISRTARSCRFALYNIRKIRPFLSEHAAQLLVQA
LVLSKLDYCNSLLALLPANSIKPLQLLQNAAARVVFNEPKRAHVT
PLLVRLHWLPVAARIKFKTLMFAYKVTSGLAPSYLHSLLQIYVPS
RNLRSVNERRLVVPSQRGKKSLSRTLTLNLPSWWNELPNCIRTAE
SLAIFKKRLKTQLFSLHFTS

[0580] l) EX666: illustrates a ZFL2-2 protein with a N-terminal Nhp6a derived polypeptide. The Nhp6a derived polypeptide is shown at the N-terminus fused via a linker (shown in bold italics text) to a C-terminal ZFL2-2 protein.

### EX666 Amino Acid Sequence:

(SEQ ID NO: 47)
MAAPREPKKRTTRKKKGSSGCFLIPVVINTRKTREVRCKRNPHNL
RSIHVSTISQLSLSVGLWNCQSAVNKADFITSIATYSDYNLMALT
ETWLRPEDTATHATLSANFSFSHTPRQTGRGGGTGLLISKEWKFT
LIPSLPTISSFEFHAVTIIHPFYINVVVIYRPPGKLGHELDELDV
LLSSFSNEDTPLLVLGDFNIYVDKPQAADFQTLLASFDLKRAPTS
ATHKSGNQLDLIYTRHCFTDQTIVTPLQISDHFLLSLNIHITPEP
PHTPTLVTERRNLRSLSPNRLSTIVSDSLPPSRKLTALDSNSAIN
TLCSTLASCLDRLCPLASRPARASPPAPWLSDALREHRSKLRAAE
RIWRKTKNPAHLLTYQTLLSSFSAEVTSAKQTYYRLKINNATNPR
LLFKTFSSLLYPPPPPASSTLTTDDFATFFCTKTAKISAQFAAPT
TNTQDTTPTPHTLTSFSQLSESEVSKLVLSSHATTCPLDPIPSHL
LQAISPAVIPTLTHIINTSLDSGLFPTTFKQARVTPLLKKPNLDH
TLLENYRPVSLLPFMAKILEKVVENQVLDELTQNNLMDNKQSGFK
KGHSTETALLSVVEDLRLAKADSKSSVLILLDLSAAFDTVNHQIL
LSTLESLGVAGTVIQWFRSYLSDRSFRVSWRGEVSNLQHLNTGVP
QGSVLGPLLFSIYTSSLGPVIQRHGFSYHCYADDTQLYLSFHPDD
PSVPARISACLLDISHWMKDHHLQLNLAKTEMLVVSANPTLHHNF
SIQMDGATITASKMVKSLGVTIDDQLNFSDHISRTARSCRFALYN
IRKIRPFLSEHAAQLLVQALVLSKLDYCNSLLALLPANSIKPLQL
LQNAAARVVFNEPKRAHVTPLLVRLHWLPVAARIKFKTLMFAYKV
TSGLAPSYLHSLLQIYVPSRNLRSVNERRLVVPSQRGKKSLSRTL
TLNLPSWWNELPNCIRTAESLAIFKKRLKTQLFSLHFTS

[0581] m) SM002: illustrates a ZFL2-2 driver protein comprising a wild-type ZFL2-2 protein.

### SM002 Amino Acid Sequence:

(SEQ ID NO: 51)
MCFLIPVVTNTRKTREVRCKRNPHNLRSIHVSTISQLSLSVGLWN
CQSAVNKADFITSIATYSDYNLMALTETWLRPEDTATHATLSANF
SFSHTPRQTGRGGGTGLLISKEWKFTLIPSLPTISSFEFHAVTII
HPFYINVVVIYRPPGKLGHFLDELDVLLSSESNEDTPLLVLGDFN
IYVDKPQAADFQTLLASFDLKRAPTSATHKSGNQLDLIYTRHCFT
DQTIVTPLQISDHFLLSLNIHITPEPPHTPTLVTFRRNLRSLSPN
RLSTIVSDSLPPSRKLTALDSNSAINTLCSTLASCLDRLCPLASR
PARASPPAPWLSDALREHRSKLRAAERIWRKTKNPAHLLTYQTLL
SSFSAEVTSAKQTYYRLKINNAINPRLLFKTFSSLLYPPPPPASS
TLTTDDFATFFCTKTAKISAQFAAPTTNTQDTTPTPHILISFSQL
SESEVSKLVLSSHATTCPLDPIPSHLLQAISPAVIPTLTHIINTS
LDSGLFPTTFKQARVTPLLKKPNLDHTLLENYRPVSLLPFMAKIL
EKVVENQVLDELTQNNLMDNKQSGFKKGHSTETALLSVVEDLRLA
KADSKSSVLILLDLSAAFDTVNHQILLSTLESLGVAGTVIQWERS
YLSDRSFRVSWRGEVSNLQHLNTGVPQGSVLGPLLFSIYTSSLGP
VIQRHGFSYHCYADDTQLYLSFHPDDPSVPARISACLLDISHWMK
DHHLQLNLAKTEMLVVSANPTLHHNFSIQMDGATITASKMVKSLG
VTIDDQLNFSDHISRTARSCRFALYNIRKIRPFLSEHAAQLLVQA
LVLSKLDYCNSLLALLPANSIKPLQLLQNAAARVVFNEPKRAHVT
PLLVRLHWLPVAARIKFKTLMFAYKVTSGLAPSYLHSLLQIYVPS
RNLRSVNERRLVVPSQRGKKSLSRTLTLNLPSWWNELPNCIRTAE
SLAIFKKRLKTQLESLHFTS

### SM002 DNA Sequence:

(SEQ ID NO: 52)
TGCAGGGTCGACTAATACGACTCACTATAGGGAGAGATATCCCTA
GCTAGTTCACCGCGGCAGCGGTCGCGGCAGCCTCGTGTGAAGACC
GACGAGGGTAAAGACCATCGACTCTACCTGCGCGACTCCACCGAG
CAAAGACACCGACAAAGCACTTGAGTACTTTACTTTATTGTTTTA
CTTTACACTTATTTTTTGTTGTCAGTGCACTTTTATTATGTGTTT
TCTAATTCCTGTTGTTACTAACACTCGCAAAACACGGGAGGTACG
CTGCAAGCGTAATCCTCACAACCTTCGTTCAATACATGTATCTAC
TATTTCACAACTCTCTCTCTCCGTGGGCCTCTGGAATTGTCAATC
AGCTGTTAACAAGGCTGATTTTATTACCTCCATAGCTACATATTC
TGACTATAATCTCATGGCTCTAACTGAGACCTGGTTGAGGCCGGA
GGACACTGCTACACATGCTACTCTTTCTGCTAATTTCTCTTTTTC
CCACACTCCTCGTCAGACAGGGAGAGGGGGTGGGACTGGACTACT
AATTTCCAAAGAATGGAAATTTACTCTGATACCGTCCCTGCCAAC
AATCAGCTCCTTTGAATTCCATGCAGTCACCATTATCCACCCCTT
CTACATAAATGTGGTTGTCATCTACCGCCCACCAGGTAAATTAGG
TCACTTCCTAGATGAACTGGATGTTCTTCTCTCATCTTTTTCTAA
TTTTGACACTCCCTTATTGGTGCTAGGIGACTTCAACATTTACGT
TGACAAACCGCAAGCTGCAGACTTTCAGACTTTGCTTGCCTCTTT
TGACCTAAAAAGAGCACCTACTTCTGCTACCCACAAATCAGGTAA
TCAGCTAGACCTTATTTACACACGACACTGCTTCACTGATCAAAC
AATAGTAACTCCACTACAAATATCTGATCATTTCCTTCTGTCTCT
CAACATCCACATTACTCCTGAGCCGCCACACACTCCTACACTGGT
TACCTTTCGCAGAAACCTACGATCTCTCTCACCCAATAGACTATC
CACCATTGTTTCAGACTCTCTTCCTCCATCTCGCAAACTCACTGC
ACTTGATTCGAACAGTGCCACTAATACACTCTGCTCCACACTAGC
ATCATGTCTAGACCGATTATGTCCTCTTGCATCCAGGCCAGCCCG
TGCCAGTCCTCCTGCACCCTGGCTCTCGGATGCTCTCCGTGAGCA
TCGCTCAAAACTTCGGGCTGCGGAGAGAATTTGGCGGAAAACTAA
AAATCCTGCACATCTCTTAACATACCAAACTCTTCTGTCCTCTTT
CTCAGCTGAGGTTACTTCTGCAAAGCAGACGTATTACCGTCTGAA
AATCAACAATGCCACTAATCCTCGCCTACTTTTTAAAACATTTTC
CTCCCTCCTATATCCTCCTCCTCCACCCGCATCCTCCACACTTAC
TACTGATGACTTTGCTACATTCTTCTGCACCAAAACTGCAAAAAT
CAGTGCTCAATTTGCTGCACCTACAACAAACACGCAAGATACAAC
ACCAACACCACACACACTCACCTCTTTTTCTCAGCTCTCTGAGTC
TGAGGTGTCCAAACTTGTGCTATCTAGCCATGCAACCACCTGTCC
ACTCGATCCCATTCCCTCTCATCTCTTGCAAGCCATCTCTCCTGC
AGTCATACCAACACTGACTCACATAATTAACACATCTCTTGACTC
TGGTTTATTCCCCACTACATTTAAGCAGGCTAGGGTAACCCCACT
GCTAAAGAAACCCAACCTGGACCATACGCTACTTGAAAACTACAG
ACCAGTATCCCTGCTTCCATTCATGGCCAAGATTCTGGAGAAAGT
AGTGTTCAATCAAGTCCTGGACTTTCTTACTCAAAACAATCTCAT
GGACAACAAGCAATCCGGCTTTAAGAAAGGCCACTCAACTGAGAC
TGCCCTGCTCTCGGTCGTGGAGGATCTCAGACTGGCTAAAGCAGA
CTCTAAATCATCAGTCCTCATTTTGCTGGACTTGTCAGCTGCTTT
TGACACTGTCAACCACCAGATCCTGCTATCTACGCTTGAGTCACT
GGGCGTTGCGGGCACTGTTATACAATGGTTTAGATCTTACCTCTC
TGACAGGTCATTCAGGGTGTCTTGGAGGGGAGAGGTGTCCAACCT
ACAGCATCTAAACACTGGGGTACCTCAAGGCTCTGTTCTTGGGCC
ACTTCTCTTCTCCATCTACACATCATCTCTAGGACCAGTCATCCA
GAGACATGGATTCTCCTACCACTGCTATGCTGATGACACCCAGCT
ATACCTCTCTTTTCATCCTGATGATCCCTCGGTTCCAGCTCGTAT
CTCAGCCTGCCTGTTGGATATTICACACTGGATGAAAGATCATCA
TCTTCAGCTGAACCTCGCAAAAACGGAAATGCTTGTAGTTTCTGC
CAACCCGACTCTACACCATAACTTTTCAATCCAGATGGATGGGGC
AACCATTACTGCATCCAAAATGGTGAAAAGCCTTGGAGTAACGAT
TGATGACCAACTAAACTTCTCTGACCACATTTCTAGAACTGCTCG
ATCGTGCAGATTTGCACTCTATAACATCAGAAAGATCCGACCCTT
CTTATCTGAACATGCAGCTCAACTCCTTGTTCAAGCTCTTGTTCT
CTCCAAACTGGATTACTGCAACTCTCTACTAGCTTTGCTTCCAGC
TAACTCTATCAAGCCTCTTCAACTGCTCCAGAATGCAGCAGCACG
AGTTGTCTTCAATGAACCTAAACGAGCACATGTCACTCCGCTGCT
AGTCCGTTTGCACTGGCTGCCAGITGCTGCTCGCATCAAATTCAA
AACTCTGATGTTTGCCTACAAAGTGACTTCTGGCCTAGCACCTTC
TTATCTGCACTCACTTCTGCAGATCTATGTGCCCTCCAGAAACTT
GCGTTCTGTGAATGAACGTCGCCTCGTGGTTCCATCCCAAAGAGG
GAAAAAATCACTTTCGCGAACGCTCACGCTCAATCTGCCCAGTTG
GTGGAATGAACTCCCTAACTGCATCAGAACAGCAGAGTCACTCGC
TATTTTCAAGAAACGACTAAAAACTCAACTATTTAGTCTCCACTT
CACTTCCTAAGCTGCAATTGCCTCTTTGAATATCACACTAATTGT
ACAAAAAAAAAAAAAAAAAAAAAAAAAACTACTAACACTTCCCTT
CTTAGACTTTACAGACCGCGGCCTACTCGGATCCGCGATGATGAT
CAGACATGATAAGATACATTGATGAGTTTGGACAAACCACAACTA
GAATGCAGTGAAAAAAATGCTTTATTTGTGAAATTTGTGATGCTA
TTGCTTTATTTGTAACCATTATAAGCTGCAATAAACAAGTTAACA
ACAACAAAAAAAAAAAAAAAAAAAAATTTAAATGCGCGCATC

[0582] a) SM003: illustrates an EGFP reporter gene delivery construct, e.g., for use in trans with a ZFL2-2 driver (e.g. the various ZFL2-2 drivers listed above).

### SM003 DNA Sequence:

(SEQ ID NO: 53)
TGCAGGGTCGACTAATACGACTCACTATAGGGAGAGATAATTGCC
TCTTTGAATATCACACTAATTGTACAAAAAAAAAAAAAAAAAAAA
AAAAAACTACTAACACTTCCCTTCTTAGACTTTACAGACCGCGGC
CTACTCGACGGATCGATCCGAACAAACGACCCAACACCCGTGCGT
TTTATTCTGTCTTTTTATTGCCGATCCCCTCAGAAGAACTCGTCA
AGAAGGCGATAGAAGGCGATGCGCTGCGAATCGGGAGCGGCGATA
CCGTAAAGCACGAGGAAGCGGTCAGCCCATTCGCCGCCAAGCTCT
TCAGCAATATCACGGGTAGCCAACGCTATGTCCTGATAGCGGTCG
GCCGCTTTACTTGTACAGCTCGTCCATGCCGAGAGTGATCCCGGC
GGCGGTCACGAACTCCAGCAGGACCATGTGATCGCGCTTCTCGTT
GGGGTCTTTGCTCAGGGCGGACTGGGTGCTCAGGTAGTGGTTGTC
GGGCAGCAGCACGGGGCCGTCGCCGATGGGGGTGTTCTGCTGGTA
GTGGTCGGCCAGCTGCACGCTGCCGTCCTCGATGTTGTGGCGGAT
CTTGAAGTTCACCTTGATGCCGTTCTTCTGCTTGTCGGCCATGAT
ATAGACGTTGTGGCTGTTGTAGTTGTACTCCAGCTTGTGCCCCAG
GATGTTGCCGTCCTCCTTGAAGTCGATGCCCTTCAGCTCGATGCG
GTTCACCAGGGTGTCGCCCTCGAACTTCACCTCGGCGCGGGTCTT
GTAGTTGCCGTCGTCCTTGAAGAAGATGGTGCGCTCCTGGACGTA
GCCTTCGGGCATGGCGGACTTGAAGAAGTCGTGCTGCTTCATGTG
GTCGGGGTAGCGGCTGAAGCACTGCACGCCGTAGGTCAGGGTGGT
CACGAGGGTGGGCCAGGGCACGGGCAGCTTGCCGGTGGTGCAGAT
GAACTTCAGGGTCAGCTTGCCGTAGGTGGCATCGCCCTCGCCCTC
GCCGGACACGCTGAACTTGTGGCCGTTTACGTCGCCGTCCAGCTC
GACCAGGATGGGCACCACCCCGGTGAACAGCTCCTCGCCCTTGCT
CACCATGGTGGCGAATTCGAAGCTTGAGCTCGAGATCTGAGTCCG
GTAGCGCTAGCGGATCTGACGGTTCACTAAACCAGCTCTGCTTAT
ATAGACCTCCCACCGTACACGCCTACCGCCCATTTGCGTCAATGG
GGCGGAGTTGTTACGACATTTTGGAAAGTCCCGTTGATTTTGGTG
CCAAAACAAACTCCCATTGACGTCAATGGGGTGGAGACTTGGAAA
TCCCCGTGAGTCAAACCGCTATCCACGCCCATTGATGTACTGCCA
AAACCGCATCACCATGGTAATAGCGATGACTAATACGTAGATGTA
CTGCCAAGTAGGAAAGTCCCATAAGGTCATGTACTGGGCATAATG
CCAGGCGGGCCATTTACCGTCATTGACGTCAATAGGGGGCGTACT
TGGCATATGATACACTTGATGTACTGCCAAGTGGGCAGTTTACCG
TAAATACTCCACCCATTGACGTCAATGGAAAGTCCCTATTGGCGT
TACTATGGGAACATACGTCATTATTGACGTCAATGGGCGGGGGTC
GTTGGGCGGTCAGCCAGGCGGGCCATTTACCGTAAGTTATGTAAC
GCGGAACTCCATATATGGGCTATGAACTAATGACCCCGTAATTGA
TTACTATTAAATTCCTGCAGGTTTGGGTGAAACTTGCCTTTAGTA
CTTATTCATTGTTGCTCTTAGTIGTGTAAATTGCTTCCTTGTCCT
CATTTGTAAGTCGCTTTGGATAAAAGCGTCTGCTAAATGACTAAA
TGTAAATGTAAATGTAAAGGATCCGCGATGATGATCAGACATGAT
AAGATACATTGATGAGTTTGGACAAACCACAACTAGAATGCAGTG
AAAAAAATGCTTTATTTGTGAAATTTGTGATGCTATTGCTTTATT
TGTAACCATTATAAGCTGCAATAAACAAGTTAACAACAACAAAAA
AAAAAAAAAAAAAAAATTTAAATGCGCGCATCATC

### Integration Assay:

[0583] An integration assay was performed to evaluate the percentage of cells in which a stable reporter (e.g., GFP) encoded as a transgene in a gene delivery construct was integrated by retrotransposition. A GFP reporter gene delivery construct (“reporter construct”) was evaluated in combination with different engineered driver constructs in trans. The reporter construct contains an antisense expression cassette for GFP (driven by a CMV promoter and containing a polyadenylation signal from the thymidine kinase gene from the herpes simplex virus) and the 3′ UTR regulatory sequence of a zebrafish ZFL2-2 retrotransposon, which contains 3 copies of a microsatellite sequence. The trans driver construct contains the single ORF encoded by a zebrafish ZFL2-2 retrotransposon and a polyadenylated SV40 sequence ending in A30-N10-A70 (wherein the N10 are 10 non-adenosine containing nucleotides). The reporter and driver constructs were configured with T7 promoters and a unique Type IIS restriction site at the 3′ end. Upon restriction, these DNAs were used in in vitro transcription (IVT) reactions using NEB HiScribe™ T7 High Yield RNA Synthesis Kit.

[0584] Briefly, the plasmid was first dissolved and let stand at room temperature. Then, to assess the concentration of the plasmid, a nanodrop was used to measure the absorbance of the sample. The plasmid was then restricted with a restriction enzyme and cleaned using AMPure XP beads mixed into the solution. Using a magnetic tube rack the solution was aspirated with 70% ethanol added and incubated at room temperature three times. The ethanol was then removed, and the beads dried. The plasmids were then resuspended using an elution buffer, dried and resuspended in water. Once resuspended the plasmid concentration was measured.

[0585] Next, for IVT production the NEB HiScribe™ T7 High Yield RNA Synthesis Kit was used. Then for the DNase phase, the TURBO™ DNase kit AM2238 was utilized. The RNA transcript was then purified using Monarch RNA cleanup Kit T2050.

[0586] To check the quality of the sample first, quantification is done using the Nanodrop. Then using the Agilent TapStation device and the Controller software the quality and uniformity are measured.

[0587] Trans-retrotransposition assays were conducted in U2OS cells. First, cells were seeded 24 hours prior to transfection. Briefly, transfection was done using MessengerMAX™. The mRNA master mix was then prepared and mixed well. The mRNA master mix was then added to the diluted MessengerMAX™ reagent and incubated. The new RNA-lipid complex is then added to the cells and incubated overnight. Reporter integration was then checked by measuring the percent of GFP expressing cells after 24 hours using FACS analyses and fluorescent microscopy.

### Results:

[0588] FIG. 3 shows results of integration assays using ZFL2-2 drivers comprising heterologous HDR and chromatin opening domains along with p53 inhibition.

[0589] In this experiment, different driver constructs were used with the same reporter construct, GFP reporter gene delivery construct SM003 (SEQ ID NO: 52). The drivers were fusion, and cassette engineered constructs described above. IVT of different RTE drivers and reporters was carried out as described above. U20S cells were used in 24-well plates, at 100K cells/well. 1000 ng RNA was transfected with 1.2 uL Lipofectamine. Integration was assessed based on the percentage of GFP positive cells (% GFP positive cells) after 24 h, with a higher percentage of GFP positive cells being indicative of higher levels of integration. % GFP positive cells was assessed by FACS following 24 hours after transfection with RNA.

[0590] C-terminal fusion of UL12 to ZFL2-2 (EX584) increased GFP positive cells approximately two-fold compared to wild-type ZFL2-2 (SM002). C-terminal fusion of BRCA2-derived peptide to ZFL2-2 (EX594) increased GFP positive cells approximately two-fold compared to wild-type ZFL2-2 (SM002). N-terminal fusion of HMGN1 and C-terminal fusion of HMGB1 to ZFL2-2 (EX595) increased GFP positive cells approximately three-fold compared to wild-type ZFL2-2 driver (SM002). Combining these two modifications (EX596) increased GFP positive cells approximately five-fold compared to wild-type. Combining C-terminal UL12 fusion to ZFL2-2 with an N647K mutation (EX586) increased GFP positive cells approximately three-fold relative to wild-type. Combining ZFL2-2 C-terminal UL12 fusion with C-terminal Sto7D fusion increased GFP positive cells relative to wild-type ZFL2-2 by approximately two-fold when Sto7D was positioned between ZFL2-2 and UL12 (EX587), and by approximately four-fold when Sto7D was positioned after ZFL2-2 and UL12 (EX597). In these experiments, not all modifications improved integration efficiency, in particular, C-terminal fusion of NBN-derived peptide (EX282) and N-terminal fusion of Nhp6a (EX666) did not improve integration efficiency.

[0591] Altogether, these results illustrate several aspects of the application. It was found that fusing one or more polypeptides that promote HDR to a retroelement-derived enzyme domain (e.g., fusing a retroelement-derived enzyme to UL12 and/or other polypeptide that promotes HDR) improves retrotransposition (e.g., increase retrotransposition frequency relative to using a retroelement-derived enzyme that is not fused to any other polypeptide). It was also found that fusing one or more polypeptides that promote chromatin accessibility to a retroelement-derived enzyme domain (e.g., fusing a retroelement-derived enzyme to one or more HMG proteins and/or other polypeptides that promote chromatin accessibility) improves retrotransposition. It was also found that fusing one or more polypeptides that promote DNA interactions (e.g., that promote DNA binding) to a retroelement-derived enzyme domain (e.g., fusing a retroelement-derived enzyme to one or more Sto7D polypeptides and/or or other polypeptides that promote DNA interactions) improves retrotransposition. It was also found that one or more amino acid substitutions that promote Reverse Transcriptase interactions with RNA and/or DNA (e.g., including one or more amino acid modifications such as N647K substitution in LINE 2-2 and/or other amino acid modifications that promote retroelement-derived protein interactions with RNA and/or DNA) improves retrotransposition. It was also found that combining one or more of these modifications further enhances the rate of retrotransposition. It was also found that a combination of two or more modifications exhibit location-dependent effects. For example, C-terminal fusions of Sto7D followed by UL12 were less active than C-terminal fusions of UL12 followed by Sto7D.

### Example 4

[0592] In order to test the effect of mutations in potential RNA-binding regions of the driver, it was hypothesized that improving the electrostatic or structural stability of the RNA-binding domains may improve interaction with template RNA, thereby improving integration efficiency.

[0593] Nucleic acids were designed and produced to encode non-limiting examples of engineered proteins comprising a ZFL2-2-derived protein with one or more point mutations in the RNA binding domain and the reverse transcriptase domain. These were tested and evaluated using an experimental retrotransposition assay described in Example 3. Non-limiting examples of the heterologous polypeptides include:
[0594] EX120: ZFL2-2 with I343K mutation (SEQ ID NO: 341)
[0595] EX121: ZFL2-2 with Q372K mutation (SEQ ID NO: 342)
[0596] EX122: ZFL2-2 with E366N mutation (SEQ ID NO: 343)
[0597] EX123: ZFL2-2 with L354N mutation (SEQ ID NO: 344)
[0598] EX124: ZFL2-2 with D588A mutation (SEQ ID NO: 345)
[0599] EX125: ZFL2-2 with E616R+S617K mutation (SEQ ID NO: 346)
[0600] EX126: ZFL2-2 with N647K mutation (SEQ ID NO: 347)
[0601] EX132: ZFL2-2 with D550T mutation (SEQ ID NO: 348)
[0602] EX134: ZFL2-2 with D770H mutation (SEQ ID NO: 349)
[0603] EX135: ZFL2-2 with I625L mutation (SEQ ID NO: 350)
[0604] EX136: ZFL2-2 with H521P mutation (SEQ ID NO: 351)
[0605] EX137: ZFL2-2 with S737P mutation (SEQ ID NO: 352)
[0606] EX138: ZFL2-2 with P705A mutation (SEQ ID NO: 353)
[0607] EX139: ZFL2-2 with M558L mutation (SEQ ID NO: 354)
[0608] EX140: ZFL2-2 with M733L mutation (SEQ ID NO: 355)
[0609] EX141: ZFL2-2 with M760S mutation (SEQ ID NO: 356)
[0610] EX142: ZFL2-2 with M750L mutation (SEQ ID NO: 357)
[0611] EX143: ZFL2-2 with A757P mutation (SEQ ID NO: 358)
[0612] EX144: ZFL2-2 with H717A mutation (SEQ ID NO: 359)
[0613] EX146: ZFL2-2 with H717K mutation (SEQ ID NO: 360)
[0614] EX147: ZFL2-2 with D497S mutation (SEQ ID NO: 361)
[0615] EX148: ZFL2-2 with I625H mutation (SEQ ID NO: 362)

[0616] FIG. 4A shows results of integration assays using the above drivers with point mutations. In this experiment, different retrotransposable element constructs were used in the cis configuration (both driver and GFP reporter encoded by the same RNA). As such, the results of the integration assay with the above mutations were compared against a control cis driver/reporter system SM001, in which the SM001 plasmid encodes, inter alia, a ZFL2-2 driver comprising a wild type ZFL2-2 as well as a GFP reporter in a cis configuration. Aside from the mutations noted above, all constructs were identical in sequence to wild-type ZFL2-2 cis driver/reporter system (SM001).

### Amino Acid Sequence of Wild-Type FZL2-2 Driver Encoded in SM001 Plasmid:

(SEQ ID NO: 49)
MCFLIPVVTNTRKTREVRCKRNPHNLRSIHVSTISQLSLSVGLWN
CQSAVNKADFITSIATYSDYNLMALTETWLRPEDTATHATLSANF
SFSHTPRQTGRGGGIGLLISKEWKFTLIPSLPTISSFEFHAVTII
HPFYINVVVIYRPPGKLGHFLDELDVLLSSESNEDTPLLVLGDFN
IYVDKPQAADFQTLLASFDLKRAPTSATHKSGNQLDLIYTRHCFT
DQTIVTPLQISDHFLLSLNIHITPEPPHTPTLVTFRRNLRSLSPN
RLSTIVSDSLPPSRKLTALDSNSATNTLCSTLASCLDRLCPLASR
PARASPPAPWLSDALREHRSKLRAAERIWRKTKNPAHLLTYQTLL
SSFSAEVTSAKQTYYRLKINNAINPRLLFKTFSSLLYPPPPPASS
TLTTDDFATFFCTKTAKISAQFAAPTINTQDTTPTPHTLISESQL
SESEVSKLVLSSHATTCPLDPIPSHLLQAISPAVIPTLTHIINTS
LDSGLFPTTFKQARVTPLLKKPNLDHTLLENYRPVSLLPFMAKIL
EKVVFNQVLDELTQNNLMDNKQSGFKKGHSTETALLSVVEDLRLA
KADSKSSVLILLDLSAAFDTVNHQILLSTLESLGVAGTVIQWFRS
YLSDRSERVSWRGEVSNLQHLNTGVPQGSVLGPLLFSIYTSSLGP
VIQRHGFSYHCYADDTQLYLSFHPDDPSVPARISACLLDISHWMK
DHHLQLNLAKTEMLVVSANPTLHHNFSIQMDGATITASKMVKSLG
VTIDDQLNFSDHISRTARSCRFALYNIRKIRPFLSEHAAQLLVQA
LVLSKLDYCNSLLALLPANSIKPLQLLQNAAARVVFNEPKRAHVT
PLLVRLHWLPVAARIKFKTLMFAYKVTSGLAPSYLHSLLQIYVPS
RNLRSVNERRLVVPSQRGKKSLSRTLTLNLPSWWNELPNCIRTAE
SLAIFKKRLKTQLESLHFTS

### SM001 Plasmid DNA Sequence:

(SEQ ID NO: 50)
tgcaGGGTCGACTAATACGACTCACTATAGGGAGAGATATCCctagcTAGTTCACCGCGGCAGC
GGTCGCGGCAGCCTCGTGTGAAGACCGACGAGGGTAAAGACCATCGACTCTACCTGCGCGACTC
CACCGAGCAAAGACACCGACAAAGCACTTGAGTACTTTACTTTATTGTTTTACTTTACACTTAT
TTTTTGTTGTCAGTGCACTTTTATTatgTGTTTTCTAATTCCTGTTGTTACTAACACTCGCAAA
ACACGGGAGGTACGCTGCAAGCGTAATCCTCACAACCTTCGTTCAATACATGTATCTACTATTT
CACAACTCTCTCTCTCCGTGGGCCTCTGGAATTGTCAATCAGCTGTTAACAAGGCTGATTTTAT
TACCTCCATAGCTACATATTCTGACTATAATCTCATGGCTCTAACTGAGACCTGGTTGAGGCCG
GAGGACACTGCTACACATGCTACTCTTTCTGCTAATTTCTCTTTTTCCCACACTCCTCGTCAGA
CAGGGAGAGGGGGTGGGACTGGACTACTAATTTCCAAAGAATGGAAATTTACTCTGATACCGTC
CCTGCCAACAATCAGCTCCTTTGAATTCCATGCAGTCACCATTATCCACCCCTTCTACATAAAT
GTGGTTGTCATCTACCGCCCACCAGGTAAATTAGGTCACTTCCTAGATGAACTGGATGTTCTTC
TCTCATCTTTTTCTAATTTTGACACTCCCTTATTGGTGCTAGGTGACTTCAACATTTACGTTGA
CAAACCGCAAGCTGCAGACTTTCAGACTTTGCTTGCCTCTTTTGACCTAAAAAGAGCACCTACT
TCTGCTACCCACAAATCAGGTAATCAGCTAGACCTTATTTACACACGACACTGCTTCACTGATC
AAACAATAGTAACTCCACTACAAATATCTGATCATTTCCTTCTGTCTCTCAACATCCACATTAC
TCCTGAGCCGCCACACACTCCTACACTGGTTACCTTTCGCAGAAACCTACGATCTCTCTCACCC
AATAGACTATCCACCATTGTTTCAGACTCTCTTCCTCCATCTCGCAAACTCACTGCACTTGATT
CGAACAGTGCCACTAATACACTCTGCTCCACACTAGCATCATGTCTAGACCGATTATGTCCTCT
TGCATCCAGGCCAGCCCGTGCCAGTCCTCCTGCACCCTGGCTCTCGGATGCTCTCCGTGAGCAT
CGCTCAAAACTTCGGGCTGCGGAGAGAATTTGGCGGAAAACTAAAAATCCTGCACATCTCTTAA
CATACCAAACTCTTCTGTCCTCTTTCTCAGCTGAGGTTACTTCTGCAAAGCAGACGTATTACCG
TCTGAAAATCAACAATGCCACTAATCCTCGCCTACTTTTTAAAACATTTTCCTCCCTCCTATAT
CCTCCTCCTCCACCCGCATCCTCCACACTTACTACTGATGACTTTGCTACATTCTTCTGCACCA
AAACTGCAAAAATCAGTGCTCAATTTGCTGCACCTACAACAAACACGCAAGATACAACACCAAC
ACCACACACACTCACCTCTTTTTCTCAGCTCTCTGAGTCTGAGGTGTCCAAACTTGTGCTATCT
AGCCATGCAACCACCTGTCCACTCGATCCCATTCCCTCTCATCTCTTGCAAGCCATCTCTCCTG
CAGTCATACCAACACTGACTCACATAATTAACACATCTCTTGACTCTGGTTTATTCCCCACTAC
ATTTAAGCAGGCTAGGGTAACCCCACTGCTAAAGAAACCCAACCTGGACCATACGCTACTTGAA
AACTACAGACCAGTATCCCTGCTTCCATTCATGGCCAAGATTCTGGAGAAAGTAGTGTTCAATC
AAGTCCTGGACTTTCTTACTCAAAACAATCTCATGGACAACAAGCAATCCGGCTTTAAGAAAGG
CCACTCAACTGAGACTGCCCTGCTCTCGGTCGTGGAGGATCTCAGACTGGCTAAAGCAGACTCT
AAATCATCAGTCCTCATTTTGCTGGACTTGTCAGCTGCTTTTGACACTGTCAACCACCAGATCC
TGCTATCTACGCTTGAGTCACTGGGCGTTGCGGGCACTGTTATACAATGGTTTAGATCTTACCT
CTCTGACAGGTCATTCAGGGTGTCTTGGAGGGGAGAGGTGTCCAACCTACAGCATCTAAACACT
GGGGTACCTCAAGGCTCTGTTCTTGGGCCACTTCTCTTCTCCATCTACACATCATCTCTAGGAC
CAGTCATCCAGAGACATGGATTCTCCTACCACTGCTATGCTGATGACACCCAGCTATACCTCTC
TTTTCATCCTGATGATCCCTCGGTTCCAGCTCGTATCTCAGCCTGCCTGTTGGATATTTCACAC
TGGATGAAAGATCATCATCTTCAGCTGAACCTCGCAAAAACGGAAATGCTTGTAGTTTCTGCCA
ACCCGACTCTACACCATAACTTTTCAATCCAGATGGATGGGGCAACCATTACTGCATCCAAAAT
GGTGAAAAGCCTTGGAGTAACGATTGATGACCAACTAAACTTCTCTGACCACATTTCTAGAACT
GCTCGATCGTGCAGATTTGCACTCTATAACATCAGAAAGATCCGACCCTTCTTATCTGAACATG
CAGCTCAACTCCTTGTTCAAGCTCTTGTTCTCTCCAAACTGGATTACTGCAACTCTCTACTAGC
TTTGCTTCCAGCTAACTCTATCAAGCCTCTTCAACTGCTCCAGAATGCAGCAGCACGAGTTGTC
TTCAATGAACCTAAACGAGCACATGTCACTCCGCTGCTAGTCCGTTTGCACTGGCTGCCAGTTG
CTGCTCGCATCAAATTCAAAACTCTGATGTTTGCCTACAAAGTGACTTCTGGCCTAGCACCTTC
TTATCTGCACTCACTTCTGCAGATCTATGTGCCCTCCAGAAACTTGCGTTCTGTGAATGAACGT
CGCCTCGTGGTTCCATCCCAAAGAGGGAAAAAATCACTTTCGCGAACGCTCACGCTCAATCTGC
CCAGTTGGTGGAATGAACTCCCTAACTGCATCAGAACAGCAGAGTCACTCGCTATTTTCAAGAA
ACGACTAAAAACTCAACTATTTAGTCTCCACTTCACTTCCtaaGCTGCAATTGCCTCTTTGAAT
ATCACACTAATTGTACAAAAAAAAAAAAAAAAAAAAAAAAAACTACTAACACTTCCCTTCTTAG
ACTTTACAGACCgcggcctacTCGACGGATcgatccgaacaaacgACCCAACACCCGTGCGTTT
TATTCTGTCTTTTTATTGCCGATCCCCTCAGAAGAACTCGTCAAGAAGGCGATAGAAGGCGATG
CGCTGCGAATCGGGAGCGGCGATACCGTAAAGCACGAGGAAGCGGTCAGCCCATTCGCCGCCAA
GCTCTTCAGCAATATCACGGGTAGCCAACGCTATGTCCTGATAGCGGTCGGCCGCTttaCTTGT
ACAGCTCGTCCATGCCGAGAGTGATCCCGGCGGCGGTCACGAACTCCAGCAGGACCATGTGATC
GCGCTTCTCGTTGGGGTCTTTGCTCAGGGCGGACTGGGTGCTCAGGTAGTGGTTGTCGGGCAGC
AGCACGGGGCCGTCGCCGATGGGGGTGTTCTGCTGGTAGTGGTCGGCCAGCTGCACGCTGCCGT
CCTCGATGTTGTGGCGGATCTTGAAGTTCACCTTGATGCCGTTCTTCTGCTTGTCGGCCATGAT
ATAGACGTTGTGGCTGTTGTAGTTGTACTCCAGCTTGTGCCCCAGGATGTTGCCGTCCTCCTTG
AAGTCGATGCCCTTCAGCTCGATGCGGTTCACCAGGGTGTCGCCCTCGAACTTCACCTCGGCGC
GGGTCTTGTAGITGCCGTCGTCCTTGAAGAAGATGGTGCGCTCCTGGACGTAGCCTTCGGGCAT
GGCGGACTTGAAGAAGTCGTGCTGCTTCATGTGGTCGGGGTAGCGGCTGAAGCACTGCACGCCG
TAGGTCAGGGTGGTCACGAGGGTGGGCCAGGGCACGGGCAGCTTGCCGGTGGTGCAGATGAACT
TCAGGGTCAGCTTGCCGTAGGTGGCATCGCCCTCGCCCTCGCCGGACACGCTGAACTTGTGGCC
GTTTACGTCGCCGTCCAGCTCGACCAGGATGGGCACCACCCCGGTGAACAGCTCCTCGCCCTTG
CTCACcatGGTGGCGAATTCGAAGCTTGAGCTCGAGATCTGAGTCCGGTAGCGCTAGCGGATCT
GACGGTTCACTAAACCAGCTCTGCTTATATAGACCTCCCACCGTACACGCCTACCGCCCATTTG
CGTCAATGGGGCGGAGTTGTTACGACATTTTGGAAAGTCCCGTTGATTTTGGTGCCAAAACAAA
CTCCCATTGACGTCAATGGGGTGGAGACTTGGAAATCCCCGTGAGTCAAACCGCTATCCACGCC
CATTGATGTACTGCCAAAACCGCATCACCATGGTAATAGCGATGACTAATACGTAGATGTACTG
CCAAGTAGGAAAGTCCCATAAGGTCATGTACTGGGCATAATGCCAGGCGGGCCATTTACCGTCA
TTGACGTCAATAGGGGGCGTACTTGGCATATGATACACTTGATGTACTGCCAAGTGGGCAGTTT
ACCGTAAATACTCCACCCATTGACGTCAATGGAAAGTCCCTATTGGCGTTACTATGGGAACATA
CGTCATTATTGACGTCAATGGGCGGGGGTCGTTGGGCGGTCAGCCAGGCGGGCCATTTACCGTA
AGTTATGTAACGCGGAACTCCATATATGGGCTATGAACTAATGACCCcgtaattgattactatt
aaattcctgcaggtttgggTGAAACTTGCCTTTAGTACTTATTCATTGTTGCTCTTAGTTGTGT
AAATTGCTTCCTTGTCCTCATTTGTAAGTCGCTTTGGATAAAAGCGTCTGCTAAATGACTAAAT
GTAAATGTAAATGTAAAggatccGCGATGATGATCagacatgataagatacattgatgagtttg
gacaaaccacaactagaatgcagtgaaaaaaatgctttatttgtgaaatttgtgatgctattgc
tttatttgtaaccattataagctgcaataaacaagttaacaacaacaaaaaaaaaaaaaaaaaa
aaATTTAAATgcgcgcatc

[0617] IVT of different RTE constructs was carried out as described above. U20S cells were used in 96-well plate, at 15K cells/well. 500 ng RNA was transfected with 0.45 uL Lipofectamine. Integration was assessed based on the percentage of GFP positive cells (% GFP positive cells) after 24 h, with a higher percentage of GFP positive cells being indicative of higher levels of integration. % of GFP expressing cells was assessed by FACS 24 hours after transfection with RNA.

[0618] I343K mutation in ZFL2-2 (EX120) increased GFP positive cells approximately two-fold compared to wild-type ZFL2-2 (SM001). Q372K mutation in ZFL2-2 (EX121) increased GFP positive cells approximately 50% compared to wild-type ZFL2-2 (SM001). D588A mutation in ZFL2-2 (EX124) increased GFP positive cells approximately 50% compared to wild-type ZFL2-2 (SM001). N647K mutation in ZFL2-2 (EX126) increased GFP positive cells approximately two-fold compared to wild-type ZFL2-2 (SM001). H521P mutation in ZFL2-2 (EX136) increased GFP positive cells by over two-fold compared to wild-type ZFL2-2 (SM001). S737P mutation in ZFL2-2 (EX137) increased GFP positive cells by approximately two-fold compared to wild-type ZFL2-2 (SM001). P705A mutation in ZFL2-2 (EX138) increased GFP positive cells by approximately 50% compared to wild-type ZFL2-2 (SM001). M750L mutation in ZFL2-2 (EX142) increased GFP positive cells by over two-fold compared to wild-type ZFL2-2 (SM001). A757P mutation in ZFL2-2 (EX143) increased GFP positive cells by over 50% compared to wild-type ZFL2-2 (SM001). H717A mutation in ZFL2-2 (EX144) increased GFP positive cells by over 50% compared to wild-type ZFL2-2 (SM001).

[0619] These results illustrate the general principle that mutations in the RNA binding domain and reverse transcriptase domains can improve integration efficiency of retrotransposable elements. The mechanism of improved integration may be related to improved interaction of RNA binding domain with the RNA, due to altered electrostatic interactions, for example adding a positive charge (e.g., Q372K). The mechanism of improved integration may also be related to improved interaction of the reverse transcriptase domain with the RNA that is being reverse transcribed, due to altered electrostatic interactions, for example adding a positive charge (e.g., N647K). Alternatively, structural stability of the reverse transcriptase domain can be enhanced, for example by mutations that stabilize loop regions, for example adding a proline (e.g., H521P).

### Example 5

[0620] In order to test the effect of endonuclease domain and other mutations on integration efficiency, it was hypothesized that improving electrostatic interactions with genomic DNA may improve cleavage efficiency and thereby improve observed % integrations.

[0621] Nucleic acids were designed and produced to encode non-limiting examples of engineered proteins comprising a ZFL2-2 protein with one or more-point mutations in the endonuclease domain. Two mutations in the endonuclease domain (D64K and Y139K) and other mutations were tested and evaluated using an experimental transposition assay described in Example 3. Non-limiting examples of the heterologous polypeptides include:
[0622] EX127: ZFL2-2 with A688V mutation (SEQ ID NO: 348)
[0623] EX128: ZFL2-2 with A688I mutation (SEQ ID NO: 349)
[0624] EX129: ZFL2-2 with Y139K mutation (SEQ ID NO: 350)
[0625] EX130: ZFL2-2 with D64K mutation (SEQ ID NO: 351)
[0626] EX131: ZFL2-2 with S960R mutation (SEQ ID NO: 352)
[0627] EX133: ZFL2-2 with L444F mutation (SEQ ID NO: 354)

[0628] FIG. 4B shows results of integration assays using drivers with point mutations. In this experiment, different retrotransposable element constructs were used in the cis configuration (both driver and GFP reporter encoded by the same RNA). Aside from the mutations listed, all ZFL2-2-derived proteins used were identical in sequence to-type ZFL2-2 driver (SM001). IVT of different RTE constructs was carried out as described above. U20S cells were used in 24-well plate, at 100K cells/well. 1000 ng RNA was transfected with 1.2 uL Lipofectamine. Integration was assessed based on the percentage of GFP positive cells (% GFP positive cells) after 24 h, with a higher percentage of GFP positive cells being indicative of higher levels of integration. % GFP positive cells was assessed by FACS following 24 hours after transfection with RNA.

[0629] A688V mutation in ZFL2-2 (EX127) decreased GFP positive cells compared to wild-type ZFL2-2 (SM001). A688I mutation in ZFL2-2 (EX121) significantly decreased GFP positive cells compared to wild-type ZFL2-2 (SM001). Y139K mutation in ZFL2-2 (EX129) increased GFP positive cells approximately two-fold compared to wild-type ZFL2-2 (SM001). D64K mutation in ZFL2-2 (EX130) increased GFP positive cells approximately two-fold compared to wild-type ZFL2-2 (SM001). S960R mutation in ZFL2-2 (EX131) decreased GFP positive cells compared to wild-type ZFL2-2 (SM001). L444K mutation in ZFL2-2 (EX133) decreased GFP positive cells slightly compared to wild-type ZFL2-2 (SM001).

[0630] These results illustrate the general principle that mutations in the endonuclease domain of retrotransposable elements can improve integration efficiency. Without wishing to be bound to theory, the mechanism of improved integration may be related to improved interaction of the endonuclease domain with the DNA, due to altered electrostatic interactions (e.g., Y139K adds a positive charge). The results also show the effect on activity of making mutations in the active site of the reverse transcriptase: increasing the volume of active site amino acids (e.g., A688V mutation increases the amino acid volume) can decrease integration activity.

### Example 6

[0631] In order to test the effect of combinations of domain additions and mutations on integration efficiency with the ZFL2-2 system, it was hypothesized that a combination of modifications may allow additive or synergistic improvements to integration efficiency.

[0632] Nucleic acids were designed and produced to encode non-limiting examples of engineered proteins comprising a ZFL2-2 protein with one or more-point mutations in the endonuclease domain and one or more polypeptide fusions. Mutations in the endonuclease domain (D64K), RNA binding domain (I343K), and reverse transcriptase domain (N647K, L825G) and polypeptide fusions at the N- and C-terminus (HMG and UL12 peptides) were tested and evaluated using an experimental transposition assay described in Example 3. Non-limiting examples of the constructs tested include:
[0633] EX2107: Plasmid encoding ZFL2-2-driven GFP reporter. mRNA cassette (bold) contains Clean Cap-compatible T7 RNA promoter (TriLink Biotechnologies) and A30N10A70 polyA tail. [SEQ ID NO:319]

(SEQ ID NO: 319)
TCGCGCGTTTCGGTGATGACGGTGAAAACCTCTGACACATGCAGCTCCCGGAGACGGTCACAGC
TTGTCTGTAAGCGGATGCCGGGAGCAGACAAGCCCGTCAGGGCGCGTCAGCGGGTGTTGGCGGG
TGTCGGGGCTGGCTTAACTATGCGGCATCAGAGCAGATTGTACTGAGAGTGCACCATATGCGGT
GTGAAATACCGCACAGATGCGTAAGGAGAAAATACCGCATCAGGCGCCATTCGCCATTCAGGCT
GCGCAACTGTTGGGAAGGGCGATCGGTGCGGGCCTCTTCGCTATTACGCCAGCTGGCGAAAGGG
GGATGTGCTGCAAGGCGATTAAGTTGGGTAACGCCAGGGTTTTCCCAGTCACGACGTTGTAAAA
CGACGGCCAGTGAATTGGAGATCGGTACTTCGCGAATGCGTCGAGATTGCAGGGTCGACTAATA
CGACTCACTATAAGGGCGGCCTACTCGACGGATCGATCCGAACAAACGACCCAACACCCGTGCG
TTTTATTCTGTCTTTTTATTGCCGATCCCCTCAGAAGAACTCGTCAAGAAGGCGATAGAAGGCG
ATGCGCTGCGAATCGGGAGCGGCGATACCGTAAAGCACGAGGAAGCGGTCAGCCCATTCGCCGC
CAAGCTCTTCAGCAATATCACGGGTAGCCAACGCTATGTCCTGATAGCGGTCGGCCGCTTTACT
TGTACAGCTCGTCCATGCCGAGAGTGATCCCGGCGGCGGTCACGAACTCCAGCAGGACCATGTG
ATCGCGCTTCTCGTTGGGGTCTTTGCTCAGGGCGGACTGGGTGCTCAGGTAGTGGTTGTCGGGC
AGCAGCACGGGGCCGTCGCCGATGGGGGTGTTCTGCTGGTAGTGGTCGGCCAGCTGCACGCTGC
CGTCCTCGATGTTGTGGCGGATCTTGAAGTTCACCTTGATGCCGTTCTTCTGCTTGTCGGCCAT
GATATAGACGTTGTGGCTGTTGTAGTTGTACTCCAGCTTGTGCCCCAGGATGTTGCCGTCCTCC
TTGAAGTCGATGCCCTTCAGCTCGATGCGGTTCACCAGGGTGTCGCCCTCGAACTTCACCTCGG
CGCGGGTCTTGTAGTTGCCGTCGTCCTTGAAGAAGATGGTGCGCTCCTGGACGTAGCCTTCGGG
CATGGCGGACTTGAAGAAGTCGTGCTGCTTCATGTGGTCGGGGTAGCGGCTGAAGCACTGCACG
CCGTAGGTCAGGGTGGTCACGAGGGTGGGCCAGGGCACGGGCAGCTTGCCGGTGGTGCAGATGA
ACTTCAGGGTCAGCTTGCCGTAGGTGGCATCGCCCTCGCCCTCGCCGGACACGCTGAACTTGTG
GCCGTTTACGTCGCCGTCCAGCTCGACCAGGATGGGCACCACCCCGGTGAACAGCTCCTCGCCC
TTGCTCACCATGGTGGCGAATTCGAAGCTTGAGCTCGAGATCTGAGTCCGGTAGCGCTAGCGGA
TCTGACGGTTCACTAAACCAGCTCTGCTTATATAGACCTCCCACCGTACACGCCTACCGCCCAT
TTGCGTCAATGGGGCGGAGTTGTTACGACATTTTGGAAAGTCCCGTTGATTTTGGTGCCAAAAC
AAACTCCCATTGACGTCAATGGGGTGGAGACTTGGAAATCCCCGTGAGTCAAACCGCTATCCAC
GCCCATTGATGTACTGCCAAAACCGCATCACCATGGTAATAGCGATGACTAATACGTAGATGTA
CTGCCAAGTAGGAAAGTCCCATAAGGTCATGTACTGGGCATAATGCCAGGCGGGCCATTTACCG
TCATTGACGTCAATAGGGGGCGTACTTGGCATATGATACACTTGATGTACTGCCAAGTGGGCAG
TTTACCGTAAATACTCCACCCATTGACGTCAATGGAAAGTCCCTATTGGCGTTACTATGGGAAC
ATACGTCATTATTGACGTCAATGGGCGGGGGTCGTTGGGCGGTCAGCCAGGCGGGCCATTTACC
GTAAGTTATGTAACGCGGAACTCCATATATGGGCTATGAACTAATGACCCCGTAATTGATTACT
ATTAAATTCCTGCAGGTTTGGGTGAAACTTGCCTTTAGTACTTATTCATTGTTGCTCTTAGTTG
TGTAAATTGCTTCCTTGTCCTCATTTGTAAGTCGCTTTGGATAAAAGCGTCTGCTAAATGACTA
AATGTAAATGTAAATGTAAAGGATCCAAAAAAAAAAAAAAAAAAAAAAAAAAAAAAaacgttGA
CTAAAAAAAAAAAAAAAAAAAAAAAAAAAAAAAAAAAAAAAAAAAAAAAAAAAAAAAAAAAAAA
AAAAAAAAaaaagcGTCTTCGCGCGCATCATCGGATGCCGGGACCGACGAGTGCAGAGGCGTGC
AAGCGAGCTTGGCGTAATCATGGTCATAGCTGTTTCCTGTGTGAAATTGTTATCCGCTCACAAT
TCCACACAACATACGAGCCGGAAGCATAAAGTGTAAAGCCTGGGGTGCCTAATGAGTGAGCTAA
CTCACATTAATTGCGTTGCGCTCACTGCCCGCTTTCCAGTCGGGAAACCTGTCGTGCCAGCTGC
ATTAATGAATCGGCCAACGCGCGGGGAGAGGCGGTTTGCGTATTGGGCGCTCTTCCGCTTCCTC
GCTCACTGACTCGCTGCGCTCGGTCGTTCGGCTGCGGCGAGCGGTATCAGCTCACTCAAAGGCG
GTAATACGGTTATCCACAGAATCAGGGGATAACGCAGGAAAGAACATGTGAGCAAAAGGCCAGC
AAAAGGCCAGGAACCGTAAAAAGGCCGCGTTGCTGGCGTTTTTCCATAGGCTCCGCCCCCCTGA
CGAGCATCACAAAAATCGACGCTCAAGTCAGAGGTGGCGAAACCCGACAGGACTATAAAGATAC
CAGGCGTTTCCCCCTGGAAGCTCCCTCGTGCGCTCTCCTGTTCCGACCCTGCCGCTTACCGGAT
ACCTGTCCGCCTTTCTCCCTTCGGGAAGCGTGGCGCTTTCTCATAGCTCACGCTGTAGGTATCT
CAGTTCGGTGTAGGTCGTTCGCTCCAAGCTGGGCTGTGTGCACGAACCCCCCGTTCAGCCCGAC
CGCTGCGCCTTATCCGGTAACTATCGTCTTGAGTCCAACCCGGTAAGACACGACTTATCGCCAC
TGGCAGCAGCCACTGGTAACAGGATTAGCAGAGCGAGGTATGTAGGCGGTGCTACAGAGTTCTT
GAAGTGGTGGCCTAACTACGGCTACACTAGAAGAACAGTATTTGGTATCTGCGCTCTGCTGAAG
CCAGTTACCTTCGGAAAAAGAGTTGGTAGCTCTTGATCCGGCAAACAAACCACCGCTGGTAGCG
GTGGTTTTTTTGTTTGCAAGCAGCAGATTACGCGCAGAAAAAAAGGATCTCAAGAAGATCCTTT
GATCTTTTCTACGGGGTCTGACGCTCAGTGGAACGAAAACTCACGTTAAGGGATTTTGGTCATG
AGATTATCAAAAAGGATCTTCACCTAGATCCTTTTAAATTAAAAATGAAGTTTTAAATCAATCT
AAAGTATATATGAGTAAACTTGGTCTGACAGTTACCAATGCTTAATCAGTGAGGCACCTATCTC
AGCGATCTGTCTATTTCGTTCATCCATAGTTGCCTGACTCCCCGTCGTGTAGATAACTACGATA
CGGGAGGGCTTACCATCTGGCCCCAGTGCTGCAATGATACCGCGAGACCCACGCTCACCGGCTC
CAGATTTATCAGCAATAAACCAGCCAGCCGGAAGGGCCGAGCGCAGAAGTGGTCCTGCAACTTT
ATCCGCCTCCATCCAGTCTATTAATTGTTGCCGGGAAGCTAGAGTAAGTAGTTCGCCAGTTAAT
AGTTTGCGCAACGTTGTTGCCATTGCTACAGGCATCGTGGTGTCACGCTCGTCGTTTGGTATGG
CTTCATTCAGCTCCGGTTCCCAACGATCAAGGCGAGTTACATGATCCCCCATGTTGTGCAAAAA
AGCGGTTAGCTCCTTCGGTCCTCCGATCGTTGTCAGAAGTAAGTTGGCCGCAGTGTTATCACTC
ATGGTTATGGCAGCACTGCATAATTCTCTTACTGTCATGCCATCCGTAAGATGCTTTTCTGTGA
CTGGTGAGTACTCAACCAAGTCATTCTGAGAATAGTGTATGCGGCGACCGAGTTGCTCTTGCCC
GGCGTCAATACGGGATAATACCGCGCCACATAGCAGAACTTTAAAAGTGCTCATCATTGGAAAA
CGTTCTTCGGGGCGAAAACTCTCAAGGATCTTACCGCTGTTGAGATCCAGTTCGATGTAACCCA
CTCGTGCACCCAACTGATCTTCAGCATCTTTTACTTTCACCAGCGTTTCTGGGTGAGCAAAAAC
AGGAAGGCAAAATGCCGCAAAAAAGGGAATAAGGGCGACACGGAAATGTTGAATACTCATACTC
TTCCTTTTTCAATATTATTGAAGCATTTATCAGGGTTATTGTCTCATGAGCGGATACATATTTG
AATGTATTTAGAAAAATAAACAAATAGGGGTTCCGCGCACATTTCCCCGAAAAGTGCCACCTGA
CGTCTAAGAAACCATTATTATCATGACATTAACCTATAAAAATAGGCGTATCACGAGGCCCTTT
CGTC

[0634] EX2561: Plasmid encoding ZFL2-2 driver. mRNA cassette (bold) contains Clean Cap-compatible T7 RNA promoter (TriLink Biotechnologies) and A30N10A70 polyA tail. [SEQ ID: 320]

(SEQ ID NO: 320)
TCGCGCGTTTCGGTGATGACGGTGAAAACCTCTGACACATGCAGCTCCCGGAGACGGTCACAGC
TTGTCTGTAAGCGGATGCCGGGAGCAGACAAGCCCGTCAGGGCGCGTCAGCGGGTGTTGGCGGG
TGTCGGGGCTGGCTTAACTATGCGGCATCAGAGCAGATTGTACTGAGAGTGCACCATATGCGGT
GTGAAATACCGCACAGATGCGTAAGGAGAAAATACCGCATCAGGCGCCATTCGCCATTCAGGCT
GCGCAACTGTTGGGAAGGGCGATCGGTGCGGGCCTCTTCGCTATTACGCCAGCTGGCGAAAGGG
GGATGTGCTGCAAGGCGATTAAGTTGGGTAACGCCAGGGTTTTCCCAGTCACGACGTTGTAAAA
CGACGGCCAGTGAATTGGAGATCGGTACTTCGCGAATGCGTCGAGATTGCAGGGTCGACTAATA
CGACTCACTATAAGGAGAGATATCCCTAGCTAGTTCACCGCGGCAGCGGTCGCGGCAGCCTCGT
GTGAgGACCGACGAGGGTAAAGACCATCGACTCTACCTGCGCGACTCCACCGAGCAAAGACACC
GACAAAGCACTTGAGTACTTTACTTTATTGTTTTACTTTACACTTATTTTTTGTTGTCAGTGCA
CTTTTATTATGTGTTTTCTAATTCCTGTTGTTACTAACACTCGCAAAACACGGGAGGTACGCTG
CAAGCGTAATCCTCACAACCTTCGTTCAATACATGTATCTACTATTTCACAACTCTCTCTCTCC
GTGGGCCTCTGGAATTGTCAATCAGCTGTTAACAAGGCTGATTTTATTACCTCCATAGCTACAT
ATTCTGACTATAATCTCATGGCTCTAACTGAGACCTGGTTGAGGCCGGAGGACACTGCTACACA
TGCTACTCTTTCTGCTAATTTCTCTTTTTCCCACACTCCTCGTCAGACAGGGAGAGGGGGTGGG
ACTGGACTACTAATTTCCAAAGAATGGAAATTTACTCTGATACCGTCCCTGCCAACAATCAGCT
CCTTTGAATTCCATGCAGTCACCATTATCCACCCCTTCTACATAAATGTGGTTGTCATCTACCG
CCCACCAGGTAAATTAGGTCACTTCCTAGATGAACTGGATGTTCTTCTCTCATCTTTTTCTAAT
TTTGACACTCCCTTATTGGTGCTAGGTGACTTCAACATTTACGTTGACAAACCGCAAGCTGCAG
ACTTTCAGACTTTGCTTGCCTCTTTTGACCTAAAAAGAGCACCTACTTCTGCTACCCACAAATC
AGGTAATCAGCTAGACCTTATTTACACACGACACTGCTTCACTGATCAAACAATAGTAACTCCA
CTACAAATATCTGATCATTTCCTTCTGTCTCTCAACATCCACATTACTCCTGAGCCGCCACACA
CTCCTACACTGGTTACCTTTCGCAGAAACCTACGATCTCTCTCACCCAATAGACTATCCACCAT
TGTTTCAGACTCTCTTCCTCCATCTCGCAAACTCACTGCACTTGATTCGAACAGTGCCACTAAT
ACACTCTGCTCCACACTAGCATCATGTCTAGACCGATTATGTCCTCTTGCATCCAGGCCAGCCC
GTGCCAGTCCTCCTGCACCCTGGCTCTCGGATGCTCTCCGTGAGCATCGCTCAAAACTTCGGGC
TGCGGAGAGAATTTGGCGGAAAACTAAAAATCCTGCACATCTCTTAACATACCAAACTCTTCTG
TCCTCTTTCTCAGCTGAGGTTACTTCTGCAAAGCAGACGTATTACCGTCTGAAAATCAACAATG
CCACTAATCCTCGCCTACTTTTTAAAACATTTTCCTCCCTCCTATATCCTCCTCCTCCACCCGC
ATCCTCCACACTTACTACTGATGACTTTGCTACATTCTTCTGCACCAAAACTGCAAAAATCAGT
GCTCAATTTGCTGCACCTACAACAAACACGCAAGATACAACACCAACACCACACACACTCACCT
CTTTTTCTCAGCTCTCTGAGTCTGAGGTGTCCAAACTTGTGCTATCTAGCCATGCAACCACCTG
TCCACTCGATCCCATTCCCTCTCATCTCTTGCAAGCCATCTCTCCTGCAGTCATACCAACACTG
ACTCACATAATTAACACATCTCTTGACTCTGGTTTATTCCCCACTACATTTAAGCAGGCTAGGG
TAACCCCACTGCTAAAGAAACCCAACCTGGACCATACGCTACTTGAAAACTACAGACCAGTATC
CCTGCTTCCATTCATGGCCAAGATTCTGGAGAAAGTAGTGTTCAATCAAGTCCTGGACTTTCTT
ACTCAAAACAATCTCATGGACAACAAGCAATCCGGCTTTAAGAAAGGCCACTCAACTGAGACTG
CCCTGCTCTCGGTCGTGGAGGATCTCAGACTGGCTAAAGCAGACTCTAAATCATCAGTCCTCAT
TTTGCTGGACTTGTCAGCTGCTTTTGACACTGTCAACCACCAGATCCTGCTATCTACGCTTGAG
TCACTGGGCGTTGCGGGCACTGTTATACAATGGTTTAGATCTTACCTCTCTGACAGGTCATTCA
GGGTGTCTTGGAGGGGAGAGGTGTCCAACCTACAGCATCTAAACACTGGGGTACCTCAAGGCTC
TGTTCTTGGGCCACTTCTCTTCTCCATCTACACATCATCTCTAGGACCAGTCATCCAGAGACAT
GGATTCTCCTACCACTGCTATGCTGATGACACCCAGCTATACCTCTCTTTTCATCCTGATGATC
CCTCGGTTCCAGCTCGTATCTCAGCCTGCCTGTTGGATATTTCACACTGGATGAAAGATCATCA
TCTTCAGCTGAACCTCGCAAAAACGGAAATGCTTGTAGTTTCTGCCAACCCGACTCTACACCAT
AACTTTTCAATCCAGATGGATGGGGCAACCATTACTGCATCCAAAATGGTGAAAAGCCTTGGAG
TAACGATTGATGACCAACTAAACTTCTCTGACCACATTTCTAGAACTGCTCGATCGTGCAGATT
TGCACTCTATAACATCAGAAAGATCCGACCCTTCTTATCTGAACATGCAGCTCAACTCCTTGTT
CAAGCTCTTGTTCTCTCCAAACTGGATTACTGCAACTCTCTACTAGCTTTGCTTCCAGCTAACT
CTATCAAGCCTCTTCAACTGCTCCAGAATGCAGCAGCACGAGTTGTgTTCAATGAACCTAAACG
AGCACATGTCACTCCGCTGCTAGTCCGTTTGCACTGGCTGCCAGTTGCTGCTCGCATCAAATTC
AAAACTCTGATGTTTGCCTACAAAGTGACTTCTGGCCTAGCACCTTCTTATCTGCACTCACTTC
TGCAGATCTATGTGCCCTCCAGAAACTTGCGTTCTGTGAATGAACGTCGCCTCGTGGTTCCATC
CCAAAGAGGGAAAAAATCACTTTCGCGAACGCTCACGCTCAATCTGCCCAGTTGGTGGAATGAA
CTCCCTAACTGCATCAGAACAGCAGAGTCACTCGCTATTTTCAAGAAACGACTAAAAACTCAAC
TATTTAGTCTCCACTTCACTTCCtgaTAAtagGCTGCAATTGCCTCTTTGAATATCACACTAAT
TGTACAAAAAAAAAAAAAAAAAAAAAAAAAACTACTAACACTTCCCTTCTTAGACTTTACAGAC
CGCGGCCTACTCGGATCCAAAAAAAAAAAAAAAAAAAAAAAAAAAAAAaacgttGACTAAAAAA
AAAAAAAAAAAAAAAAAAAAAAAAAAAAAAAAAAAAAAAAAAAAAAAAAAAAAAAAAAAAAAAA
aaaagcGTCTTCGCGCGCATCATCGGATGCCGGGACCGACGAGTGCAGAGGCGTGCAAGCGAGC
TTGGCGTAATCATGGTCATAGCTGTTTCCTGTGTGAAATTGTTATCCGCTCACAATTCCACACA
ACATACGAGCCGGAAGCATAAAGTGTAAAGCCTGGGGTGCCTAATGAGTGAGCTAACTCACATT
AATTGCGTTGCGCTCACTGCCCGCTTTCCAGTCGGGAAACCTGTCGTGCCAGCTGCATTAATGA
ATCGGCCAACGCGCGGGGAGAGGCGGTTTGCGTATTGGGCGCTCTTCCGCTTCCTCGCTCACTG
ACTCGCTGCGCTCGGTCGTTCGGCTGCGGCGAGCGGTATCAGCTCACTCAAAGGCGGTAATACG
GTTATCCACAGAATCAGGGGATAACGCAGGAAAGAACATGTGAGCAAAAGGCCAGCAAAAGGCC
AGGAACCGTAAAAAGGCCGCGTTGCTGGCGTTTTTCCATAGGCTCCGCCCCCCTGACGAGCATC
ACAAAAATCGACGCTCAAGTCAGAGGTGGCGAAACCCGACAGGACTATAAAGATACCAGGCGTT
TCCCCCTGGAAGCTCCCTCGTGCGCTCTCCTGTTCCGACCCTGCCGCTTACCGGATACCTGTCC
GCCTTTCTCCCTTCGGGAAGCGTGGCGCTTTCTCATAGCTCACGCTGTAGGTATCTCAGTTCGG
TGTAGGTCGTTCGCTCCAAGCTGGGCTGTGTGCACGAACCCCCCGTTCAGCCCGACCGCTGCGC
CTTATCCGGTAACTATCGTCTTGAGTCCAACCCGGTAAGACACGACTTATCGCCACTGGCAGCA
GCCACTGGTAACAGGATTAGCAGAGCGAGGTATGTAGGCGGTGCTACAGAGTTCTTGAAGTGGT
GGCCTAACTACGGCTACACTAGAAGAACAGTATTTGGTATCTGCGCTCTGCTGAAGCCAGTTAC
CTTCGGAAAAAGAGTTGGTAGCTCTTGATCCGGCAAACAAACCACCGCTGGTAGCGGTGGTTTT
TTTGTTTGCAAGCAGCAGATTACGCGCAGAAAAAAAGGATCTCAAGAAGATCCTTTGATCTTTT
CTACGGGGTCTGACGCTCAGTGGAACGAAAACTCACGTTAAGGGATTTTGGTCATGAGATTATC
AAAAAGGATCTTCACCTAGATCCTTTTAAATTAAAAATGAAGTTTTAAATCAATCTAAAGTATA
TATGAGTAAACTTGGTCTGACAGTTACCAATGCTTAATCAGTGAGGCACCTATCTCAGCGATCT
GTCTATTTCGTTCATCCATAGTTGCCTGACTCCCCGTCGTGTAGATAACTACGATACGGGAGGG
CTTACCATCTGGCCCCAGTGCTGCAATGATACCGCGAGACCCACGCTCACCGGCTCCAGATTTA
TCAGCAATAAACCAGCCAGCCGGAAGGGCCGAGCGCAGAAGTGGTCCTGCAACTTTATCCGCCT
CCATCCAGTCTATTAATTGTTGCCGGGAAGCTAGAGTAAGTAGTTCGCCAGTTAATAGTTTGCG
CAACGTTGTTGCCATTGCTACAGGCATCGTGGTGTCACGCTCGTCGTTTGGTATGGCTICATTC
AGCTCCGGTTCCCAACGATCAAGGCGAGTTACATGATCCCCCATGTTGTGCAAAAAAGCGGTTA
GCTCCTTCGGTCCTCCGATCGTTGTCAGAAGTAAGTTGGCCGCAGTGTTATCACTCATGGTTAT
GGCAGCACTGCATAATTCTCTTACTGTCATGCCATCCGTAAGATGCTTTTCTGTGACTGGTGAG
TACTCAACCAAGTCATTCTGAGAATAGTGTATGCGGCGACCGAGTTGCTCTTGCCCGGCGTCAA
TACGGGATAATACCGCGCCACATAGCAGAACTTTAAAAGTGCTCATCATTGGAAAACGTTCTTC
GGGGCGAAAACTCTCAAGGATCTTACCGCTGTTGAGATCCAGTTCGATGTAACCCACTCGTGCA
CCCAACTGATCTTCAGCATCTTTTACTTTCACCAGCGTTTCTGGGTGAGCAAAAACAGGAAGGC
AAAATGCCGCAAAAAAGGGAATAAGGGCGACACGGAAATGTTGAATACTCATACTCTTCCTTTT
TCAATATTATTGAAGCATTTATCAGGGTTATTGTCTCATGAGCGGATACATATTTGAATGTATT
TAGAAAAATAAACAAATAGGGGTTCCGCGCACATTTCCCCGAAAAGTGCCACCTGACGTCTAAG
AAACCATTATTATCATGACATTAACCTATAAAAATAGGCGTATCACGAGGCCCTTTCGTC

[0635] EX2556: Plasmid encoding ZFL2-2 driver with N-terminal HMGN1, N647K mutation, C-terminal UL12 fusion followed by C-terminal HMGB1 fusion. mRNA cassette (bold) contains Clean Cap-compatible T7 RNA promoter (TriLink Biotechnologies) and A30N10A70 polyA tail. [SEQ ID NO: 321]

(SEQ ID NO: 321)
TCGCGCGTTTCGGTGATGACGGTGAAAACCTCTGACACATGCAGCTCCCGGAGACGGTCACAGCTTGTCT
GTAAGCGGATGCCGGGAGCAGACAAGCCCGTCAGGGCGCGTCAGCGGGTGTTGGCGGGTGTCGGGGC
TGGCTTAACTATGCGGCATCAGAGCAGATTGTACTGAGAGTGCACCATATGCGGTGTGAAATACCGCAC
AGATGCGTAAGGAGAAAATACCGCATCAGGCGCCATTCGCCATTCAGGCTGCGCAACTGTTGGGAAGGG
CGATCGGTGCGGGCCTCTTCGCTATTACGCCAGCTGGCGAAAGGGGGATGTGCTGCAAGGCGATTAAGT
TGGGTAACGCCAGGGTTTTCCCAGTCACGACGTTGTAAAACGACGGCCAGTGAATTGGAGATCGGTACT
TCGCGAATGCGTCGAGATTGCAGGGTCGACTAATACGACTCACTATAAGGAGAGATATCCCTAGCTAGTT
CACCGCGGCAGCGGTCGCGGCAGCCTCGTGTGAgGACCGACGAGGGTAAAGACCATCGACTCTACCTGC
GCGACTCCACCGAGCAAAGACACCGACAAAGCACTTGAGTACTTTACTTTATTGTTTTACTTTACACTTAT
TTTTTGTTGTCAGTGCACTTTTATTATGCCTAAGAGAAAGGTGTCCAGCGCCGAGGGCGCTGCCAAGGAA
GAGCCTAAACGGAGAAGCGCCAGACTGAGCGCCAAGCCCCCCGCCAAGGTGGAAGCCAAGCCTAAGAA
GGCCGCCGCTAAGGACAAGAGCAGCGATAAGAAAGTCCAGACCAAGGGCAAGCGGGGCGCCAAAGGC
AAACAGGCCGAGGTGGCCAACCAGGAGACAAAGGAAGATCTGCCTGCTGAGAACGGCGAAACCAAGAC
CGAGGAATCTCCAGCTTCTGACGAGGCCGGAGAGAAGGAGGCCAAAAGCGACAGCGGCTCTGAGACAC
CTGGAACAAGCGAGAGCGCCACCCCGGAATCCTGTTTTCTAATTCCTGTTGTTACTAACACTCGCAAAAC
ACGGGAGGTACGCTGCAAGCGTAATCCTCACAACCTTCGTTCAATACATGTATCTACTATTTCACAACTCT
CTCTCTCCGTGGGCCTCTGGAATTGTCAATCAGCTGTTAACAAGGCTGATTTTATTACCTCCATAGCTACA
TATTCTGACTATAATCTCATGGCTCTAACTGAGACCTGGTTGAGGCCGGAGGACACTGCTACACATGCTA
CTCTTTCTGCTAATTTCTCTTTTTCCCACACTCCTCGTCAGACAGGGAGAGGGGGTGGGACTGGACTACTA
ATTTCCAAAGAATGGAAATTTACTCTGATACCGTCCCTGCCAACAATCAGCTCCTTTGAATTCCATGCAGT
CACCATTATCCACCCCTTCTACATAAATGTGGTTGTCATCTACCGCCCACCAGGTAAATTAGGTCACTTCCT
AGATGAACTGGATGTTCTTCTCTCATCTTTTTCTAATTTTGACACTCCCTTATTGGTGCTAGGTGACTTCAA
CATTTACGTTGACAAACCGCAAGCTGCAGACTTTCAGACTTTGCTTGCCTCTTTTGACCTAAAAAGAGCAC
CTACTTCTGCTACCCACAAATCAGGTAATCAGCTAGACCTTATTTACACACGACACTGCTTCACTGATCAA
ACAATAGTAACTCCACTACAAATATCTGATCATTTCCTTCTGTCTCTCAACATCCACATTACTCCTGAGCCG
CCACACACTCCTACACTGGTTACCTTTCGCAGAAACCTACGATCTCTCTCACCCAATAGACTATCCACCATT
GTTTCAGACTCTCTTCCTCCATCTCGCAAACTCACTGCACTTGATTCGAACAGTGCCACTAATACACTCTGC
TCCACACTAGCATCATGTCTAGACCGATTATGTCCTCTTGCATCCAGGCCAGCCCGTGCCAGTCCTCCTGC
ACCCTGGCTCTCGGATGCTCTCCGTGAGCATCGCTCAAAACTTCGGGCTGCGGAGAGAATTTGGCGGAA
AACTAAAAATCCTGCACATCTCTTAACATACCAAACTCTTCTGTCCTCTTTCTCAGCTGAGGTTACTTCTGC
AAAGCAGACGTATTACCGTCTGAAAATCAACAATGCCACTAATCCTCGCCTACTTTTTAAAACATTTTCCTC
CCTCCTATATCCTCCTCCTCCACCCGCATCCTCCACACTTACTACTGATGACTTTGCTACATTCTTCTGCACC
AAAACTGCAAAAATCAGTGCTCAATTTGCTGCACCTACAACAAACACGCAAGATACAACACCAACACCAC
ACACACTCACCTCTTTTTCTCAGCTCTCTGAGTCTGAGGTGTCCAAACTTGTGCTATCTAGCCATGCAACC
ACCTGTCCACTCGATCCCATTCCCTCTCATCTCTTGCAAGCCATCTCTCCTGCAGTCATACCAACACTGACT
CACATAATTAACACATCTCTTGACTCTGGTTTATTCCCCACTACATTTAAGCAGGCTAGGGTAACCCCACT
GCTAAAGAAACCCAACCTGGACCATACGCTACTTGAAAACTACAGACCAGTATCCCTGCTTCCATTCATG
GCCAAGATTCTGGAGAAAGTAGTGTTCAATCAAGTCCTGGACTTTCTTACTCAAAACAATCTCATGGACA
ACAAGCAATCCGGCTTTAAGAAAGGCCACTCAACTGAGACTGCCCTGCTCTCGGTCGTGGAGGATCTCA
GACTGGCTAAAGCAGACTCTAAATCATCAGTCCTCATTTTGCTGGACTTGTCAGCTGCTTTTGACACTGTC
AACCACCAGATCCTGCTATCTACGCTTGAGTCACTGGGCGTTGCGGGCACTGTTATACAATGGTTTAGAT
CTTACCTCTCTGACAGGTCATTCAGGGTGTCTTGGAGGGGAGAGGTGTCCaagCTACAGCATCTAAACAC
TGGGGTACCTCAAGGCTCTGTTCTTGGGCCACTTCTCTTCTCCATCTACACATCATCTCTAGGACCAGTCA
TCCAGAGACATGGATTCTCCTACCACTGCTATGCTGATGACACCCAGCTATACCTCTCTTTTCATCCTGAT
GATCCCTCGGTTCCAGCTCGTATCTCAGCCTGCCTGTTGGATATTTCACACTGGATGAAAGATCATCATCT
TCAGCTGAACCTCGCAAAAACGGAAATGCTTGTAGTTTCTGCCAACCCGACTCTACACCATAACTTTTCAA
TCCAGATGGATGGGGCAACCATTACTGCATCCAAAATGGTGAAAAGCCTTGGAGTAACGATTGATGACC
AACTAAACTTCTCTGACCACATTTCTAGAACTGCTCGATCGTGCAGATTTGCACTCTATAACATCAGAAAG
ATCCGACCCTTCTTATCTGAACATGCAGCTCAACTCCTTGTTCAAGCTCTTGTTCTCTCCAAACTGGATTAC
TGCAACTCTCTACTAGCTTTGCTTCCAGCTAACTCTATCAAGCCTCTTCAACTGCTCCAGAATGCAGCAGC
ACGAGTTGTgTTCAATGAACCTAAACGAGCACATGTCACTCCGCTGCTAGTCCGTTTGCACTGGCTGCCA
GTTGCTGCTCGCATCAAATTCAAAACTCTGATGTTTGCCTACAAAGTGACTTCTGGCCTAGCACCTTCTTA
TCTGCACTCACTTCTGCAGATCTATGTGCCCTCCAGAAACTTGCGTTCTGTGAATGAACGTCGCCTCGTGG
TTCCATCCCAAAGAGGGAAAAAATCACTTTCGCGAACGCTCACGCTCAATCTGCCCAGTTGGTGGAATGA
ACTCCCTAACTGCATCAGAACAGCAGAGTCACTCGCTATTTTCAAGAAACGACTAAAAACTCAACTATTTA
GTCTCCACTTCACTTCCTCCGGCTCCGAGACTCCTGGAACAAGCGAGAGCGCTACACCTGAGGGCAGCG
AAAGCACAGTCGGCCCTGCTTGCCCCCCAGGAAGAACCGTGACCAAGCGGCCCTGGGCCCTGGCCGAG
GACACCCCTAGGGGCCCCGATAGCCCCCCCAAAAGACCCCGGCCTAACAGCCTGCCTCTGACCACAACAT
TCAGACCTCTGCCTCCTCCACCTCAGACCACCAGCGCCGTGGACCCTAGCAGCCACTCCCCTGTGAACCC
CCCTCGGGACCAGCACGCCACAGATACCGCCGACGAGAAGCCCAGAGCCGCTTCTCCAGCCCTGAGCGA
CGCCAGCGGACCTCCTACCCCTGACATCCCCCTGTCTCCTGGCGGCACCCACGCCAGAGATCCTGATGCT
GATCCTGACTCTCCAGACCTGGACAGCTCCGGCTCCGAGACTCCTGGAACAAGCGAGAGCGCTACACCT
GAGGGAAAAGGCGACCCCAAGAAACCTAGAGGCAAGATGAGCAGCTACGCCTTTTTCGTGCAGACCTGT
CGGGAAGAGCACAAGAAAAAGCACCCTGACGCCAGCGTGAACTTCTCTGAGTTCAGCAAGAAGTGCAG
CGAGAGATGGAAaACAATGTCCGCCAAGGAAAAGGGCAAGTTCGAGGACATGGCCAAGGCTGATAAGG
CCAGATACGAGCGGGAAATGAAAACCTACATCCCACCTAAGGGCGAGGGCGGATCTGGCAAAAGAACC
GCTGATGGCAGCGAGTTCGAGAGCCCCAAGAAAAAGAGAAAGGTGtgaTAAtagGCTGCAATTGCCTCTT
TGAATATCACACTAATTGTACAAAAAAAAAAAAAAAAAAAAAAAAAACTACTAACACTTCCCTTCTTAGAC
TTTACAGACCGCGGCCTACTCGGATCCAAAAAAAAAAAAAAAAAAAAAAAAAAAAAAaacgttGACTAAAA
AAAAAAAAAAAAAAAAAAAAAAAAAAAAAAAAAAAAAAAAAAAAAAAAAAAAAAAAAAAAAAAAAAaaa
agcGTCTTCGCGCGCATCATCGGATGCCGGGACCGACGAGTGCAGAGGCGTGCAAGCGAGCTTGGCGTA
ATCATGGTCATAGCTGTTTCCTGTGTGAAATTGTTATCCGCTCACAATTCCACACAACATACGAGCCGGAA
GCATAAAGTGTAAAGCCTGGGGTGCCTAATGAGTGAGCTAACTCACATTAATTGCGTTGCGCTCACTGCC
CGCTTTCCAGTCGGGAAACCTGTCGTGCCAGCTGCATTAATGAATCGGCCAACGCGCGGGGAGAGGCG
GTTTGCGTATTGGGCGCTCTTCCGCTTCCTCGCTCACTGACTCGCTGCGCTCGGTCGTTCGGCTGCGGCG
AGCGGTATCAGCTCACTCAAAGGCGGTAATACGGTTATCCACAGAATCAGGGGATAACGCAGGAAAGAA
CATGTGAGCAAAAGGCCAGCAAAAGGCCAGGAACCGTAAAAAGGCCGCGTTGCTGGCGTTTTTCCATAG
GCTCCGCCCCCCTGACGAGCATCACAAAAATCGACGCTCAAGTCAGAGGTGGCGAAACCCGACAGGACT
ATAAAGATACCAGGCGTTTCCCCCTGGAAGCTCCCTCGTGCGCTCTCCTGTTCCGACCCTGCCGCTTACCG
GATACCTGTCCGCCTTTCTCCCTTCGGGAAGCGTGGCGCTTTCTCATAGCTCACGCTGTAGGTATCTCAGT
TCGGTGTAGGTCGTTCGCTCCAAGCTGGGCTGTGTGCACGAACCCCCCGTTCAGCCCGACCGCTGCGCCT
TATCCGGTAACTATCGTCTTGAGTCCAACCCGGTAAGACACGACTTATCGCCACTGGCAGCAGCCACTGG
TAACAGGATTAGCAGAGCGAGGTATGTAGGCGGTGCTACAGAGTTCTTGAAGTGGTGGCCTAACTACGG
CTACACTAGAAGAACAGTATTTGGTATCTGCGCTCTGCTGAAGCCAGTTACCTTCGGAAAAAGAGTTGGT
AGCTCTTGATCCGGCAAACAAACCACCGCTGGTAGCGGTGGTTTTTTTGTTTGCAAGCAGCAGATTACGC
GCAGAAAAAAAGGATCTCAAGAAGATCCTTTGATCTTTTCTACGGGGTCTGACGCTCAGTGGAACGAAA
ACTCACGTTAAGGGATTTTGGTCATGAGATTATCAAAAAGGATCTTCACCTAGATCCTTTTAAATTAAAAA
TGAAGTTTTAAATCAATCTAAAGTATATATGAGTAAACTTGGTCTGACAGTTACCAATGCTTAATCAGTGA
GGCACCTATCTCAGCGATCTGTCTATTTCGTTCATCCATAGTTGCCTGACTCCCCGTCGTGTAGATAACTA
CGATACGGGAGGGCTTACCATCTGGCCCCAGTGCTGCAATGATACCGCGAGACCCACGCTCACCGGCTC
CAGATTTATCAGCAATAAACCAGCCAGCCGGAAGGGCCGAGCGCAGAAGTGGTCCTGCAACTTTATCCG
CCTCCATCCAGTCTATTAATTGTTGCCGGGAAGCTAGAGTAAGTAGTTCGCCAGTTAATAGTTTGCGCAA
CGTTGTTGCCATTGCTACAGGCATCGTGGTGTCACGCTCGTCGTTTGGTATGGCTTCATTCAGCTCCGGTT
CCCAACGATCAAGGCGAGTTACATGATCCCCCATGTTGTGCAAAAAAGCGGTTAGCTCCTTCGGTCCTCC
GATCGTTGTCAGAAGTAAGTTGGCCGCAGTGTTATCACTCATGGTTATGGCAGCACTGCATAATTCTCTTA
CTGTCATGCCATCCGTAAGATGCTTTTCTGTGACTGGTGAGTACTCAACCAAGTCATTCTGAGAATAGTGT
ATGCGGCGACCGAGTTGCTCTTGCCCGGCGTCAATACGGGATAATACCGCGCCACATAGCAGAACTTTA
AAAGTGCTCATCATTGGAAAACGTTCTTCGGGGCGAAAACTCTCAAGGATCTTACCGCTGTTGAGATCCA
GTTCGATGTAACCCACTCGTGCACCCAACTGATCTTCAGCATCTTTTACTTTCACCAGCGTTTCTGGGTGA
GCAAAAACAGGAAGGCAAAATGCCGCAAAAAAGGGAATAAGGGCGACACGGAAATGTTGAATACTCAT
ACTCTTCCTTTTTCAATATTATTGAAGCATTTATCAGGGTTATTGTCTCATGAGCGGATACATATTTGAATG
TATTTAGAAAAATAAACAAATAGGGGTTCCGCGCACATTTCCCCGAAAAGTGCCACCTGACGTCTAAGAA
ACCATTATTATCATGACATTAACCTATAAAAATAGGCGTATCACGAGGCCCTTTCGTC

[0636] EX2195: Plasmid encoding ZFL2-2 driver with N-terminal HMGN1, N647K and I343K mutations, C-terminal UL12 fusion followed by C-terminal HMGB1 fusion. mRNA cassette (bold) contains Clean Cap-compatible T7 RNA promoter (TriLink Biotechnologies) and A30N10A70 polyA tail. [SEQ ID NO:322]

(SEQ ID NO: 322)
TCGCGCGTTTCGGTGATGACGGTGAAAACCTCTGACACATGCAGCTCCCGGAGACGGTCACAGCTTGTCT
GTAAGCGGATGCCGGGAGCAGACAAGCCCGTCAGGGCGCGTCAGCGGGTGTTGGCGGGTGTCGGGGC
TGGCTTAACTATGCGGCATCAGAGCAGATTGTACTGAGAGTGCACCATATGCGGTGTGAAATACCGCAC
AGATGCGTAAGGAGAAAATACCGCATCAGGCGCCATTCGCCATTCAGGCTGCGCAACTGTTGGGAAGGG
CGATCGGTGCGGGCCTCTTCGCTATTACGCCAGCTGGCGAAAGGGGGATGTGCTGCAAGGCGATTAAGT
TGGGTAACGCCAGGGTTTTCCCAGTCACGACGTTGTAAAACGACGGCCAGTGAATTGGAGATCGGTACT
TCGCGAATGCGTCGAGATTGCAGGGTCGACTAATACGACTCACTATAAGGAGAGATATCCCTAGCTAGTT
CACCGCGGCAGCGGTCGCGGCAGCCTCGTGTGAgGACCGACGAGGGTAAAGACCATCGACTCTACCTGC
GCGACTCCACCGAGCAAAGACACCGACAAAGCACTTGAGTACTTTACTTTATTGTTTTACTTTACACTTAT
TTTTTGTTGTCAGTGCACTTTTATTATGCCTAAGAGAAAGGTGTCCAGCGCCGAGGGCGCTGCCAAGGAA
GAGCCTAAACGGAGAAGCGCCAGACTGAGCGCCAAGCCCCCCGCCAAGGTGGAAGCCAAGCCTAAGAA
GGCCGCCGCTAAGGACAAGAGCAGCGATAAGAAAGTCCAGACCAAGGGCAAGCGGGGCGCCAAAGGC
AAACAGGCCGAGGTGGCCAACCAGGAGACAAAGGAAGATCTGCCTGCTGAGAACGGCGAAACCAAGAC
CGAGGAATCTCCAGCTTCTGACGAGGCCGGAGAGAAGGAGGCCAAAAGCGACAGCGGCTCTGAGACAC
CTGGAACAAGCGAGAGCGCCACCCCGGAATCCTGTTTTCTAATTCCTGTTGTTACTAACACTCGCAAAAC
ACGGGAGGTACGCTGCAAGCGTAATCCTCACAACCTTCGTTCAATACATGTATCTACTATTTCACAACTCT
CTCTCTCCGTGGGCCTCTGGAATTGTCAATCAGCTGTTAACAAGGCTGATTTTATTACCTCCATAGCTACA
TATTCTGACTATAATCTCATGGCTCTAACTGAGACCTGGTTGAGGCCGGAGGACACTGCTACACATGCTA
CTCTTTCTGCTAATTTCTCTTTTTCCCACACTCCTCGTCAGACAGGGAGAGGGGGTGGGACTGGACTACTA
ATTTCCAAAGAATGGAAATTTACTCTGATACCGTCCCTGCCAACAATCAGCTCCTTTGAATTCCATGCAGT
CACCATTATCCACCCCTTCTACATAAATGTGGTTGTCATCTACCGCCCACCAGGTAAATTAGGTCACTTCCT
AGATGAACTGGATGTTCTTCTCTCATCTTTTTCTAATTTTGACACTCCCTTATTGGTGCTAGGTGACTTCAA
CATTTACGTTGACAAACCGCAAGCTGCAGACTTTCAGACTTTGCTTGCCTCTTTTGACCTAAAAAGAGCAC
CTACTTCTGCTACCCACAAATCAGGTAATCAGCTAGACCTTATTTACACACGACACTGCTTCACTGATCAA
ACAATAGTAACTCCACTACAAATATCTGATCATTTCCTTCTGTCTCTCAACATCCACATTACTCCTGAGCCG
CCACACACTCCTACACTGGTTACCTTTCGCAGAAACCTACGATCTCTCTCACCCAATAGACTATCCACCATT
GTTTCAGACTCTCTTCCTCCATCTCGCAAACTCACTGCACTTGATTCGAACAGTGCCACTAATACACTCTGC
TCCACACTAGCATCATGTCTAGACCGATTATGTCCTCTTGCATCCAGGCCAGCCCGTGCCAGTCCTCCTGC
ACCCTGGCTCTCGGATGCTCTCCGTGAGCATCGCTCAAAACTTCGGGCTGCGGAGAGAaagTGGCGGAA
AACTAAAAATCCTGCACATCTCTTAACATACCAAACTCTTCTGTCCTCTTTCTCAGCTGAGGTTACTTCTGC
AAAGCAGACGTATTACCGTCTGAAAATCAACAATGCCACTAATCCTCGCCTACTTTTTAAAACATTTTCCTC
CCTCCTATATCCTCCTCCTCCACCCGCATCCTCCACACTTACTACTGATGACTTTGCTACATTCTTCTGCACC
AAAACTGCAAAAATCAGTGCTCAATTTGCTGCACCTACAACAAACACGCAAGATACAACACCAACACCAC
ACACACTCACCTCTTTTTCTCAGCTCTCTGAGTCTGAGGTGTCCAAACTTGTGCTATCTAGCCATGCAACC
ACCTGTCCACTCGATCCCATTCCCTCTCATCTCTTGCAAGCCATCTCTCCTGCAGTCATACCAACACTGACT
CACATAATTAACACATCTCTTGACTCTGGTTTATTCCCCACTACATTTAAGCAGGCTAGGGTAACCCCACT
GCTAAAGAAACCCAACCTGGACCATACGCTACTTGAAAACTACAGACCAGTATCCCTGCTTCCATTCATG
GCCAAGATTCTGGAGAAAGTAGTGTTCAATCAAGTCCTGGACTTTCTTACTCAAAACAATCTCATGGACA
ACAAGCAATCCGGCTTTAAGAAAGGCCACTCAACTGAGACTGCCCTGCTCTCGGTCGTGGAGGATCTCA
GACTGGCTAAAGCAGACTCTAAATCATCAGTCCTCATTTTGCTGGACTTGTCAGCTGCTTTTGACACTGTC
AACCACCAGATCCTGCTATCTACGCTTGAGTCACTGGGCGTTGCGGGCACTGTTATACAATGGTTTAGAT
CTTACCTCTCTGACAGGTCATTCAGGGTGTCTTGGAGGGGAGAGGTGTCCaagCTACAGCATCTAAACAC
TGGGGTACCTCAAGGCTCTGTTCTTGGGCCACTTCTCTTCTCCATCTACACATCATCTCTAGGACCAGTCA
TCCAGAGACATGGATTCTCCTACCACTGCTATGCTGATGACACCCAGCTATACCTCTCTTTTCATCCTGAT
GATCCCTCGGTTCCAGCTCGTATCTCAGCCTGCCTGTTGGATATTTCACACTGGATGAAAGATCATCATCT
TCAGCTGAACCTCGCAAAAACGGAAATGCTTGTAGTTTCTGCCAACCCGACTCTACACCATAACTTTTCAA
TCCAGATGGATGGGGCAACCATTACTGCATCCAAAATGGTGAAAAGCCTTGGAGTAACGATTGATGACC
AACTAAACTTCTCTGACCACATTTCTAGAACTGCTCGATCGTGCAGATTTGCACTCTATAACATCAGAAAG
ATCCGACCCTTCTTATCTGAACATGCAGCTCAACTCCTTGTTCAAGCTCTTGTTCTCTCCAAACTGGATTAC
TGCAACTCTCTACTAGCTTTGCTTCCAGCTAACTCTATCAAGCCTCTTCAACTGCTCCAGAATGCAGCAGC
ACGAGTTGTgTTCAATGAACCTAAACGAGCACATGTCACTCCGCTGCTAGTCCGTTTGCACTGGCTGCCA
GTTGCTGCTCGCATCAAATTCAAAACTCTGATGTTTGCCTACAAAGTGACTTCTGGCCTAGCACCTTCTTA
TCTGCACTCACTTCTGCAGATCTATGTGCCCTCCAGAAACTTGCGTTCTGTGAATGAACGTCGCCTCGTGG
TTCCATCCCAAAGAGGGAAAAAATCACTTTCGCGAACGCTCACGCTCAATCTGCCCAGTTGGTGGAATGA
ACTCCCTAACTGCATCAGAACAGCAGAGTCACTCGCTATTTTCAAGAAACGACTAAAAACTCAACTATTTA
GTCTCCACTTCACTTCCTCCGGCTCCGAGACTCCTGGAACAAGCGAGAGCGCTACACCTGAGGGCAGCG
AAAGCACAGTCGGCCCTGCTTGCCCCCCAGGAAGAACCGTGACCAAGCGGCCCTGGGCCCTGGCCGAG
GACACCCCTAGGGGCCCCGATAGCCCCCCCAAAAGACCCCGGCCTAACAGCCTGCCTCTGACCACAACAT
TCAGACCTCTGCCTCCTCCACCTCAGACCACCAGCGCCGTGGACCCTAGCAGCCACTCCCCTGTGAACCC
CCCTCGGGACCAGCACGCCACAGATACCGCCGACGAGAAGCCCAGAGCCGCTTCTCCAGCCCTGAGCGA
CGCCAGCGGACCTCCTACCCCTGACATCCCCCTGTCTCCTGGCGGCACCCACGCCAGAGATCCTGATGCT
GATCCTGACTCTCCAGACCTGGACAGCTCCGGCTCCGAGACTCCTGGAACAAGCGAGAGCGCTACACCT
GAGGGAAAAGGCGACCCCAAGAAACCTAGAGGCAAGATGAGCAGCTACGCCTTTTTCGTGCAGACCTGT
CGGGAAGAGCACAAGAAAAAGCACCCTGACGCCAGCGTGAACTTCTCTGAGTTCAGCAAGAAGTGCAG
CGAGAGATGGAAaACAATGTCCGCCAAGGAAAAGGGCAAGTTCGAGGACATGGCCAAGGCTGATAAGG
CCAGATACGAGCGGGAAATGAAAACCTACATCCCACCTAAGGGCGAGGGCGGATCTGGCAAAAGAACC
GCTGATGGCAGCGAGTTCGAGAGCCCCAAGAAAAAGAGAAAGGTGtaaGCTGCAATTGCCTCTTTGAAT
ATCACACTAATTGTACAAAAAAAAAAAAAAAAAAAAAAAAAACTACTAACACTTCCCTTCTTAGACTTTAC
AGACCGCGGCCTACTCGGATCCAAAAAAAAAAAAAAAAAAAAAAAAAAAAAAaacgttGACTAAAAAAAA
AAAAAAAAAAAAAAAAAAAAAAAAAAAAAAAAAAAAAAAAAAAAAAAAAAAAAAAAAAAAAAaaaagcGT
CTTCGCGCGCATCATCGGATGCCGGGACCGACGAGTGCAGAGGCGTGCAAGCGAGCTTGGCGTAATCA
TGGTCATAGCTGTTTCCTGTGTGAAATTGTTATCCGCTCACAATTCCACACAACATACGAGCCGGAAGCAT
AAAGTGTAAAGCCTGGGGTGCCTAATGAGTGAGCTAACTCACATTAATTGCGTTGCGCTCACTGCCCGCT
TTCCAGTCGGGAAACCTGTCGTGCCAGCTGCATTAATGAATCGGCCAACGCGCGGGGAGAGGCGGTTTG
CGTATTGGGCGCTCTTCCGCTTCCTCGCTCACTGACTCGCTGCGCTCGGTCGTTCGGCTGCGGCGAGCGG
TATCAGCTCACTCAAAGGCGGTAATACGGTTATCCACAGAATCAGGGGATAACGCAGGAAAGAACATGT
GAGCAAAAGGCCAGCAAAAGGCCAGGAACCGTAAAAAGGCCGCGTTGCTGGCGTTTTTCCATAGGCTCC
GCCCCCCTGACGAGCATCACAAAAATCGACGCTCAAGTCAGAGGTGGCGAAACCCGACAGGACTATAAA
GATACCAGGCGTTTCCCCCTGGAAGCTCCCTCGTGCGCTCTCCTGTTCCGACCCTGCCGCTTACCGGATAC
CTGTCCGCCTTTCTCCCTTCGGGAAGCGTGGCGCTTTCTCATAGCTCACGCTGTAGGTATCTCAGTTCGGT
GTAGGTCGTTCGCTCCAAGCTGGGCTGTGTGCACGAACCCCCCGTTCAGCCCGACCGCTGCGCCTTATCC
GGTAACTATCGTCTTGAGTCCAACCCGGTAAGACACGACTTATCGCCACTGGCAGCAGCCACTGGTAACA
GGATTAGCAGAGCGAGGTATGTAGGCGGTGCTACAGAGTTCTTGAAGTGGTGGCCTAACTACGGCTACA
CTAGAAGAACAGTATTTGGTATCTGCGCTCTGCTGAAGCCAGTTACCTTCGGAAAAAGAGTTGGTAGCTC
TTGATCCGGCAAACAAACCACCGCTGGTAGCGGTGGTTTTTTTGTTTGCAAGCAGCAGATTACGCGCAGA
AAAAAAGGATCTCAAGAAGATCCTTTGATCTTTTCTACGGGGTCTGACGCTCAGTGGAACGAAAACTCAC
GTTAAGGGATTTTGGTCATGAGATTATCAAAAAGGATCTTCACCTAGATCCTTTTAAATTAAAAATGAAGT
TTTAAATCAATCTAAAGTATATATGAGTAAACTTGGTCTGACAGTTACCAATGCTTAATCAGTGAGGCACC
TATCTCAGCGATCTGTCTATTTCGTTCATCCATAGTTGCCTGACTCCCCGTCGTGTAGATAACTACGATAC
GGGAGGGCTTACCATCTGGCCCCAGTGCTGCAATGATACCGCGAGACCCACGCTCACCGGCTCCAGATT
TATCAGCAATAAACCAGCCAGCCGGAAGGGCCGAGCGCAGAAGTGGTCCTGCAACTTTATCCGCCTCCA
TCCAGTCTATTAATTGTTGCCGGGAAGCTAGAGTAAGTAGTTCGCCAGTTAATAGTTTGCGCAACGTTGT
TGCCATTGCTACAGGCATCGTGGTGTCACGCTCGTCGTTTGGTATGGCTTCATTCAGCTCCGGTTCCCAAC
GATCAAGGCGAGTTACATGATCCCCCATGTTGTGCAAAAAAGCGGTTAGCTCCTTCGGTCCTCCGATCGT
TGTCAGAAGTAAGTTGGCCGCAGTGTTATCACTCATGGTTATGGCAGCACTGCATAATTCTCTTACTGTCA
TGCCATCCGTAAGATGCTTTTCTGTGACTGGTGAGTACTCAACCAAGTCATTCTGAGAATAGTGTATGCG
GCGACCGAGTTGCTCTTGCCCGGCGTCAATACGGGATAATACCGCGCCACATAGCAGAACTTTAAAAGT
GCTCATCATTGGAAAACGTTCTTCGGGGCGAAAACTCTCAAGGATCTTACCGCTGTTGAGATCCAGTTCG
ATGTAACCCACTCGTGCACCCAACTGATCTTCAGCATCTTTTACTTTCACCAGCGTTTCTGGGTGAGCAAA
AACAGGAAGGCAAAATGCCGCAAAAAAGGGAATAAGGGCGACACGGAAATGTTGAATACTCATACTCTT
CCTTTTTCAATATTATTGAAGCATTTATCAGGGTTATTGTCTCATGAGCGGATACATATTTGAATGTATTTA
GAAAAATAAACAAATAGGGGTTCCGCGCACATTTCCCCGAAAAGTGCCACCTGACGTCTAAGAAACCATT
ATTATCATGACATTAACCTATAAAAATAGGCGTATCACGAGGCCCTTTCGTC

[0637] EX2196: Plasmid encoding ZFL2-2 driver with N-terminal HMGN1, D64K, N647K, and I343K mutations, C-terminal UL12 fusion followed by C-terminal HMGB1 fusion. mRNA cassette (bold) contains Clean Cap-compatible T7 RNA promoter (TriLink Biotechnologies) and A30N10A70 polyA tail. [SEQ ID NO: 323]

(SEQ ID NO: 323)
TCGCGCGTTTCGGTGATGACGGTGAAAACCTCTGACACATGCAGCTCCCGGAGACGGTCACAGCTTGTCT
GTAAGCGGATGCCGGGAGCAGACAAGCCCGTCAGGGCGCGTCAGCGGGTGTTGGCGGGTGTCGGGGC
TGGCTTAACTATGCGGCATCAGAGCAGATTGTACTGAGAGTGCACCATATGCGGTGTGAAATACCGCAC
AGATGCGTAAGGAGAAAATACCGCATCAGGCGCCATTCGCCATTCAGGCTGCGCAACTGTTGGGAAGGG
CGATCGGTGCGGGCCTCTTCGCTATTACGCCAGCTGGCGAAAGGGGGATGTGCTGCAAGGCGATTAAGT
TGGGTAACGCCAGGGTTTTCCCAGTCACGACGTTGTAAAACGACGGCCAGTGAATTGGAGATCGGTACT
TCGCGAATGCGTCGAGATTGCAGGGTCGACTAATACGACTCACTATAAGGAGAGATATCCCTAGCTAGTT
CACCGCGGCAGCGGTCGCGGCAGCCTCGTGTGAgGACCGACGAGGGTAAAGACCATCGACTCTACCTGC
GCGACTCCACCGAGCAAAGACACCGACAAAGCACTTGAGTACTTTACTTTATTGTTTTACTTTACACTTAT
TTTTTGTTGTCAGTGCACTTTTATTATGCCTAAGAGAAAGGTGTCCAGCGCCGAGGGCGCTGCCAAGGAA
GAGCCTAAACGGAGAAGCGCCAGACTGAGCGCCAAGCCCCCCGCCAAGGTGGAAGCCAAGCCTAAGAA
GGCCGCCGCTAAGGACAAGAGCAGCGATAAGAAAGTCCAGACCAAGGGCAAGCGGGGCGCCAAAGGC
AAACAGGCCGAGGTGGCCAACCAGGAGACAAAGGAAGATCTGCCTGCTGAGAACGGCGAAACCAAGAC
CGAGGAATCTCCAGCTTCTGACGAGGCCGGAGAGAAGGAGGCCAAAAGCGACAGCGGCTCTGAGACAC
CTGGAACAAGCGAGAGCGCCACCCCGGAATCCTGTTTTCTAATTCCTGTTGTTACTAACACTCGCAAAAC
ACGGGAGGTACGCTGCAAGCGTAATCCTCACAACCTTCGTTCAATACATGTATCTACTATTTCACAACTCT
CTCTCTCCGTGGGCCTCTGGAATTGTCAATCAGCTGTTAACAAGGCTGATTTTATTACCTCCATAGCTACA
TATTCTaagTATAATCTCATGGCTCTAACTGAGACCTGGTTGAGGCCGGAGGACACTGCTACACATGCTAC
TCTTTCTGCTAATTTCTCTTTTTCCCACACTCCTCGTCAGACAGGGAGAGGGGGTGGGACTGGACTACTAA
TTTCCAAAGAATGGAAATTTACTCTGATACCGTCCCTGCCAACAATCAGCTCCTTTGAATTCCATGCAGTC
ACCATTATCCACCCCTTCTACATAAATGTGGTTGTCATCTACCGCCCACCAGGTAAATTAGGTCACTTCCTA
GATGAACTGGATGTTCTTCTCTCATCTTTTTCTAATTTTGACACTCCCTTATTGGTGCTAGGTGACTTCAAC
ATTTACGTTGACAAACCGCAAGCTGCAGACTTTCAGACTTTGCTTGCCTCTTTTGACCTAAAAAGAGCACC
TACTTCTGCTACCCACAAATCAGGTAATCAGCTAGACCTTATTTACACACGACACTGCTTCACTGATCAAA
CAATAGTAACTCCACTACAAATATCTGATCATTTCCTTCTGTCTCTCAACATCCACATTACTCCTGAGCCGC
CACACACTCCTACACTGGTTACCTTTCGCAGAAACCTACGATCTCTCTCACCCAATAGACTATCCACCATTG
TTTCAGACTCTCTTCCTCCATCTCGCAAACTCACTGCACTTGATTCGAACAGTGCCACTAATACACTCTGCT
CCACACTAGCATCATGTCTAGACCGATTATGTCCTCTTGCATCCAGGCCAGCCCGTGCCAGTCCTCCTGCA
CCCTGGCTCTCGGATGCTCTCCGTGAGCATCGCTCAAAACTTCGGGCTGCGGAGAGAaagTGGCGGAAA
ACTAAAAATCCTGCACATCTCTTAACATACCAAACTCTTCTGTCCTCTTTCTCAGCTGAGGTTACTTCTGCA
AAGCAGACGTATTACCGTCTGAAAATCAACAATGCCACTAATCCTCGCCTACTTTTTAAAACATTTTCCTCC
CTCCTATATCCTCCTCCTCCACCCGCATCCTCCACACTTACTACTGATGACTTTGCTACATTCTTCTGCACCA
AAACTGCAAAAATCAGTGCTCAATTTGCTGCACCTACAACAAACACGCAAGATACAACACCAACACCACA
CACACTCACCTCTTTTTCTCAGCTCTCTGAGTCTGAGGTGTCCAAACTTGTGCTATCTAGCCATGCAACCAC
CTGTCCACTCGATCCCATTCCCTCTCATCTCTTGCAAGCCATCTCTCCTGCAGTCATACCAACACTGACTCA
CATAATTAACACATCTCTTGACTCTGGTTTATTCCCCACTACATTTAAGCAGGCTAGGGTAACCCCACTGC
TAAAGAAACCCAACCTGGACCATACGCTACTTGAAAACTACAGACCAGTATCCCTGCTTCCATTCATGGCC
AAGATTCTGGAGAAAGTAGTGTTCAATCAAGTCCTGGACTTTCTTACTCAAAACAATCTCATGGACAACA
AGCAATCCGGCTTTAAGAAAGGCCACTCAACTGAGACTGCCCTGCTCTCGGTCGTGGAGGATCTCAGACT
GGCTAAAGCAGACTCTAAATCATCAGTCCTCATTTTGCTGGACTTGTCAGCTGCTTTTGACACTGTCAACC
ACCAGATCCTGCTATCTACGCTTGAGTCACTGGGCGTTGCGGGCACTGTTATACAATGGTTTAGATCTTA
CCTCTCTGACAGGTCATTCAGGGTGTCTTGGAGGGGAGAGGTGTCCaagCTACAGCATCTAAACACTGGG
GTACCTCAAGGCTCTGTTCTTGGGCCACTTCTCTTCTCCATCTACACATCATCTCTAGGACCAGTCATCCAG
AGACATGGATTCTCCTACCACTGCTATGCTGATGACACCCAGCTATACCTCTCTTTTCATCCTGATGATCCC
TCGGTTCCAGCTCGTATCTCAGCCTGCCTGTTGGATATTTCACACTGGATGAAAGATCATCATCTTCAGCT
GAACCTCGCAAAAACGGAAATGCTTGTAGTTTCTGCCAACCCGACTCTACACCATAACTTTTCAATCCAGA
TGGATGGGGCAACCATTACTGCATCCAAAATGGTGAAAAGCCTTGGAGTAACGATTGATGACCAACTAA
ACTTCTCTGACCACATTTCTAGAACTGCTCGATCGTGCAGATTTGCACTCTATAACATCAGAAAGATCCGA
CCCTTCTTATCTGAACATGCAGCTCAACTCCTTGTTCAAGCTCTTGTTCTCTCCAAACTGGATTACTGCAAC
TCTCTACTAGCTTTGCTTCCAGCTAACTCTATCAAGCCTCTTCAACTGCTCCAGAATGCAGCAGCACGAGT
TGTgTTCAATGAACCTAAACGAGCACATGTCACTCCGCTGCTAGTCCGTTTGCACTGGCTGCCAGTTGCTG
CTCGCATCAAATTCAAAACTCTGATGTTTGCCTACAAAGTGACTTCTGGCCTAGCACCTTCTTATCTGCACT
CACTTCTGCAGATCTATGTGCCCTCCAGAAACTTGCGTTCTGTGAATGAACGTCGCCTCGTGGTTCCATCC
CAAAGAGGGAAAAAATCACTTTCGCGAACGCTCACGCTCAATCTGCCCAGTTGGTGGAATGAACTCCCTA
ACTGCATCAGAACAGCAGAGTCACTCGCTATTTTCAAGAAACGACTAAAAACTCAACTATTTAGTCTCCAC
TTCACTTCCTCCGGCTCCGAGACTCCTGGAACAAGCGAGAGCGCTACACCTGAGGGCAGCGAAAGCACA
GTCGGCCCTGCTTGCCCCCCAGGAAGAACCGTGACCAAGCGGCCCTGGGCCCTGGCCGAGGACACCCCT
AGGGGCCCCGATAGCCCCCCCAAAAGACCCCGGCCTAACAGCCTGCCTCTGACCACAACATTCAGACCTC
TGCCTCCTCCACCTCAGACCACCAGCGCCGTGGACCCTAGCAGCCACTCCCCTGTGAACCCCCCTCGGGA
CCAGCACGCCACAGATACCGCCGACGAGAAGCCCAGAGCCGCTTCTCCAGCCCTGAGCGACGCCAGCG
GACCTCCTACCCCTGACATCCCCCTGTCTCCTGGCGGCACCCACGCCAGAGATCCTGATGCTGATCCTGA
CTCTCCAGACCTGGACAGCTCCGGCTCCGAGACTCCTGGAACAAGCGAGAGCGCTACACCTGAGGGAAA
AGGCGACCCCAAGAAACCTAGAGGCAAGATGAGCAGCTACGCCTTTTTCGTGCAGACCTGTCGGGAAGA
GCACAAGAAAAAGCACCCTGACGCCAGCGTGAACTTCTCTGAGTTCAGCAAGAAGTGCAGCGAGAGATG
GAAaACAATGTCCGCCAAGGAAAAGGGCAAGTTCGAGGACATGGCCAAGGCTGATAAGGCCAGATACG
AGCGGGAAATGAAAACCTACATCCCACCTAAGGGCGAGGGCGGATCTGGCAAAAGAACCGCTGATGGC
AGCGAGTTCGAGAGCCCCAAGAAAAAGAGAAAGGTGtaaGCTGCAATTGCCTCTTTGAATATCACACTAA
TTGTACAAAAAAAAAAAAAAAAAAAAAAAAAACTACTAACACTTCCCTTCTTAGACTTTACAGACCGCGG
CCTACTCGGATCCAAAAAAAAAAAAAAAAAAAAAAAAAAAAAAaacgttGACTAAAAAAAAAAAAAAAAAA
AAAAAAAAAAAAAAAAAAAAAAAAAAAAAAAAAAAAAAAAAAAAAAAAAAAAaaaagcGTCTTCGCGCGC
ATCATCGGATGCCGGGACCGACGAGTGCAGAGGCGTGCAAGCGAGCTTGGCGTAATCATGGTCATAGC
TGTTTCCTGTGTGAAATTGTTATCCGCTCACAATTCCACACAACATACGAGCCGGAAGCATAAAGTGTAAA
GCCTGGGGTGCCTAATGAGTGAGCTAACTCACATTAATTGCGTTGCGCTCACTGCCCGCTTTCCAGTCGG
GAAACCTGTCGTGCCAGCTGCATTAATGAATCGGCCAACGCGCGGGGAGAGGCGGTTTGCGTATTGGG
CGCTCTTCCGCTTCCTCGCTCACTGACTCGCTGCGCTCGGTCGTTCGGCTGCGGCGAGCGGTATCAGCTC
ACTCAAAGGCGGTAATACGGTTATCCACAGAATCAGGGGATAACGCAGGAAAGAACATGTGAGCAAAA
GGCCAGCAAAAGGCCAGGAACCGTAAAAAGGCCGCGTTGCTGGCGTTTTTCCATAGGCTCCGCCCCCCT
GACGAGCATCACAAAAATCGACGCTCAAGTCAGAGGTGGCGAAACCCGACAGGACTATAAAGATACCAG
GCGTTTCCCCCTGGAAGCTCCCTCGTGCGCTCTCCTGTTCCGACCCTGCCGCTTACCGGATACCTGTCCGC
CTTTCTCCCTTCGGGAAGCGTGGCGCTTTCTCATAGCTCACGCTGTAGGTATCTCAGTTCGGTGTAGGTC
GTTCGCTCCAAGCTGGGCTGTGTGCACGAACCCCCCGTTCAGCCCGACCGCTGCGCCTTATCCGGTAACT
ATCGTCTTGAGTCCAACCCGGTAAGACACGACTTATCGCCACTGGCAGCAGCCACTGGTAACAGGATTAG
CAGAGCGAGGTATGTAGGCGGTGCTACAGAGTTCTTGAAGTGGTGGCCTAACTACGGCTACACTAGAAG
AACAGTATTTGGTATCTGCGCTCTGCTGAAGCCAGTTACCTTCGGAAAAAGAGTTGGTAGCTCTTGATCC
GGCAAACAAACCACCGCTGGTAGCGGTGGTTTTTTTGTTTGCAAGCAGCAGATTACGCGCAGAAAAAAA
GGATCTCAAGAAGATCCTTTGATCTTTTCTACGGGGTCTGACGCTCAGTGGAACGAAAACTCACGTTAAG
GGATTTTGGTCATGAGATTATCAAAAAGGATCTTCACCTAGATCCTTTTAAATTAAAAATGAAGTTTTAAA
TCAATCTAAAGTATATATGAGTAAACTTGGTCTGACAGTTACCAATGCTTAATCAGTGAGGCACCTATCTC
AGCGATCTGTCTATTTCGTTCATCCATAGTTGCCTGACTCCCCGTCGTGTAGATAACTACGATACGGGAG
GGCTTACCATCTGGCCCCAGTGCTGCAATGATACCGCGAGACCCACGCTCACCGGCTCCAGATTTATCAG
CAATAAACCAGCCAGCCGGAAGGGCCGAGCGCAGAAGTGGTCCTGCAACTTTATCCGCCTCCATCCAGT
CTATTAATTGTTGCCGGGAAGCTAGAGTAAGTAGTTCGCCAGTTAATAGTTTGCGCAACGTTGTTGCCAT
TGCTACAGGCATCGTGGTGTCACGCTCGTCGTTTGGTATGGCTTCATTCAGCTCCGGTTCCCAACGATCA
AGGCGAGTTACATGATCCCCCATGTTGTGCAAAAAAGCGGTTAGCTCCTTCGGTCCTCCGATCGTTGTCA
GAAGTAAGTTGGCCGCAGTGTTATCACTCATGGTTATGGCAGCACTGCATAATTCTCTTACTGTCATGCCA
TCCGTAAGATGCTTTTCTGTGACTGGTGAGTACTCAACCAAGTCATTCTGAGAATAGTGTATGCGGCGAC
CGAGTTGCTCTTGCCCGGCGTCAATACGGGATAATACCGCGCCACATAGCAGAACTTTAAAAGTGCTCAT
CATTGGAAAACGTTCTTCGGGGCGAAAACTCTCAAGGATCTTACCGCTGTTGAGATCCAGTTCGATGTAA
CCCACTCGTGCACCCAACTGATCTTCAGCATCTTTTACTTTCACCAGCGTTTCTGGGTGAGCAAAAACAGG
AAGGCAAAATGCCGCAAAAAAGGGAATAAGGGCGACACGGAAATGTTGAATACTCATACTCTTCCTTTTT
CAATATTATTGAAGCATTTATCAGGGTTATTGTCTCATGAGCGGATACATATTTGAATGTATTTAGAAAAA
TAAACAAATAGGGGTTCCGCGCACATTTCCCCGAAAAGTGCCACCTGACGTCTAAGAAACCATTATTATC
ATGACATTAACCTATAAAAATAGGCGTATCACGAGGCCCTTTCGTC

EX2199: Plasmid encoding ZFL2-2 driver with N-terminal HMGN1, D64K, N647K, L825G, and I343K mutations, C-terminal UL12 fusion followed by C-terminal HMGB1 fusion. mRNA cassette (bold) contains Clean Cap-compatible T7 RNA promoter (TriLink Biotechnologies) and A30N10A70 polyA tail. [SEQ ID NO: 324]

(SEQ ID NO: 324)
TCGCGCGTTTCGGTGATGACGGTGAAAACCTCTGACACATGCAGCTCCCGGAGACGGTCACAGCTTGTCT
GTAAGCGGATGCCGGGAGCAGACAAGCCCGTCAGGGCGCGTCAGCGGGTGTTGGCGGGTGTCGGGGC
TGGCTTAACTATGCGGCATCAGAGCAGATTGTACTGAGAGTGCACCATATGCGGTGTGAAATACCGCAC
AGATGCGTAAGGAGAAAATACCGCATCAGGCGCCATTCGCCATTCAGGCTGCGCAACTGTTGGGAAGGG
CGATCGGTGCGGGCCTCTTCGCTATTACGCCAGCTGGCGAAAGGGGGATGTGCTGCAAGGCGATTAAGT
TGGGTAACGCCAGGGTTTTCCCAGTCACGACGTTGTAAAACGACGGCCAGTGAATTGGAGATCGGTACT
TCGCGAATGCGTCGAGATTGCAGGGTCGACTAATACGACTCACTATAAGGAGAGATATCCCTAGCTAGTT
CACCGCGGCAGCGGTCGCGGCAGCCTCGTGTGAgGACCGACGAGGGTAAAGACCATCGACTCTACCTGC
GCGACTCCACCGAGCAAAGACACCGACAAAGCACTTGAGTACTTTACTTTATTGTTTTACTTTACACTTAT
TTTTTGTTGTCAGTGCACTTTTATTATGCCTAAGAGAAAGGTGTCCAGCGCCGAGGGCGCTGCCAAGGAA
GAGCCTAAACGGAGAAGCGCCAGACTGAGCGCCAAGCCCCCCGCCAAGGTGGAAGCCAAGCCTAAGAA
GGCCGCCGCTAAGGACAAGAGCAGCGATAAGAAAGTCCAGACCAAGGGCAAGCGGGGCGCCAAAGGC
AAACAGGCCGAGGTGGCCAACCAGGAGACAAAGGAAGATCTGCCTGCTGAGAACGGCGAAACCAAGAC
CGAGGAATCTCCAGCTTCTGACGAGGCCGGAGAGAAGGAGGCCAAAAGCGACAGCGGCTCTGAGACAC
CTGGAACAAGCGAGAGCGCCACCCCGGAATCCTGTTTTCTAATTCCTGTTGTTACTAACACTCGCAAAAC
ACGGGAGGTACGCTGCAAGCGTAATCCTCACAACCTTCGTTCAATACATGTATCTACTATTTCACAACTCT
CTCTCTCCGTGGGCCTCTGGAATTGTCAATCAGCTGTTAACAAGGCTGATTTTATTACCTCCATAGCTACA
TATTCTaagTATAATCTCATGGCTCTAACTGAGACCTGGTTGAGGCCGGAGGACACTGCTACACATGCTAC
TCTTTCTGCTAATTTCTCTTTTTCCCACACTCCTCGTCAGACAGGGAGAGGGGGTGGGACTGGACTACTAA
TTTCCAAAGAATGGAAATTTACTCTGATACCGTCCCTGCCAACAATCAGCTCCTTTGAATTCCATGCAGTC
ACCATTATCCACCCCTTCTACATAAATGTGGTTGTCATCTACCGCCCACCAGGTAAATTAGGTCACTTCCTA
GATGAACTGGATGTTCTTCTCTCATCTTTTTCTAATTTTGACACTCCCTTATTGGTGCTAGGTGACTTCAAC
ATTTACGTTGACAAACCGCAAGCTGCAGACTTTCAGACTTTGCTTGCCTCTTTTGACCTAAAAAGAGCACC
TACTTCTGCTACCCACAAATCAGGTAATCAGCTAGACCTTATTTACACACGACACTGCTTCACTGATCAAA
CAATAGTAACTCCACTACAAATATCTGATCATTTCCTTCTGTCTCTCAACATCCACATTACTCCTGAGCCGC
CACACACTCCTACACTGGTTACCTTTCGCAGAAACCTACGATCTCTCTCACCCAATAGACTATCCACCATTG
TTTCAGACTCTCTTCCTCCATCTCGCAAACTCACTGCACTTGATTCGAACAGTGCCACTAATACACTCTGCT
CCACACTAGCATCATGTCTAGACCGATTATGTCCTCTTGCATCCAGGCCAGCCCGTGCCAGTCCTCCTGCA
CCCTGGCTCTCGGATGCTCTCCGTGAGCATCGCTCAAAACTTCGGGCTGCGGAGAGAaagTGGCGGAAA
ACTAAAAATCCTGCACATCTCTTAACATACCAAACTCTTCTGTCCTCTTTCTCAGCTGAGGTTACTTCTGCA
AAGCAGACGTATTACCGTCTGAAAATCAACAATGCCACTAATCCTCGCCTACTTTTTAAAACATTTTCCTCC
CTCCTATATCCTCCTCCTCCACCCGCATCCTCCACACTTACTACTGATGACTTTGCTACATTCTTCTGCACCA
AAACTGCAAAAATCAGTGCTCAATTTGCTGCACCTACAACAAACACGCAAGATACAACACCAACACCACA
CACACTCACCTCTTTTTCTCAGCTCTCTGAGTCTGAGGTGTCCAAACTTGTGCTATCTAGCCATGCAACCAC
CTGTCCACTCGATCCCATTCCCTCTCATCTCTTGCAAGCCATCTCTCCTGCAGTCATACCAACACTGACTCA
CATAATTAACACATCTCTTGACTCTGGTTTATTCCCCACTACATTTAAGCAGGCTAGGGTAACCCCACTGC
TAAAGAAACCCAACCTGGACCATACGCTACTTGAAAACTACAGACCAGTATCCCTGCTTCCATTCATGGCC
AAGATTCTGGAGAAAGTAGTGTTCAATCAAGTCCTGGACTTTCTTACTCAAAACAATCTCATGGACAACA
AGCAATCCGGCTTTAAGAAAGGCCACTCAACTGAGACTGCCCTGCTCTCGGTCGTGGAGGATCTCAGACT
GGCTAAAGCAGACTCTAAATCATCAGTCCTCATTTTGCTGGACTTGTCAGCTGCTTTTGACACTGTCAACC
ACCAGATCCTGCTATCTACGCTTGAGTCACTGGGCGTTGCGGGCACTGTTATACAATGGTTTAGATCTTA
CCTCTCTGACAGGTCATTCAGGGTGTCTTGGAGGGGAGAGGTGTCCaagCTACAGCATCTAAACACTGGG
GTACCTCAAGGCTCTGTTCTTGGGCCACTTCTCTTCTCCATCTACACATCATCTCTAGGACCAGTCATCCAG
AGACATGGATTCTCCTACCACTGCTATGCTGATGACACCCAGCTATACCTCTCTTTTCATCCTGATGATCCC
TCGGTTCCAGCTCGTATCTCAGCCTGCCTGTTGGATATTTCACACTGGATGAAAGATCATCATCTTCAGCT
GAACCTCGCAAAAACGGAAATGCTTGTAGTTTCTGCCAACCCGACTCTACACCATAACTTTTCAATCCAGA
TGGATGGGGCAACCATTACTGCATCCAAAATGGTGAAAAGCCTTGGAGTAACGATTGATGACCAACTAA
ACTTCTCTGACCACATTTCTAGAACTGCTCGATCGTGCAGATTTGCACTCTATAACATCAGAAAGATCCGA
CCCTTCTTATCTGAACATGCAGCTCAACTCCTTGTTCAAGCTCTTGTTCTCTCCAAACTGGATTACTGCAAC
TCTCTACTAGCTggcCTTCCAGCTAACTCTATCAAGCCTCTTCAACTGCTCCAGAATGCAGCAGCACGAGTT
GTgTTCAATGAACCTAAACGAGCACATGTCACTCCGCTGCTAGTCCGTTTGCACTGGCTGCCAGTTGCTGC
TCGCATCAAATTCAAAACTCTGATGTTTGCCTACAAAGTGACTTCTGGCCTAGCACCTTCTTATCTGCACTC
ACTTCTGCAGATCTATGTGCCCTCCAGAAACTTGCGTTCTGTGAATGAACGTCGCCTCGTGGTTCCATCCC
AAAGAGGGAAAAAATCACTTTCGCGAACGCTCACGCTCAATCTGCCCAGTTGGTGGAATGAACTCCCTAA
CTGCATCAGAACAGCAGAGTCACTCGCTATTTTCAAGAAACGACTAAAAACTCAACTATTTAGTCTCCACT
TCACTTCCTCCGGCTCCGAGACTCCTGGAACAAGCGAGAGCGCTACACCTGAGGGCAGCGAAAGCACAG
TCGGCCCTGCTTGCCCCCCAGGAAGAACCGTGACCAAGCGGCCCTGGGCCCTGGCCGAGGACACCCCTA
GGGGCCCCGATAGCCCCCCCAAAAGACCCCGGCCTAACAGCCTGCCTCTGACCACAACATTCAGACCTCT
GCCTCCTCCACCTCAGACCACCAGCGCCGTGGACCCTAGCAGCCACTCCCCTGTGAACCCCCCTCGGGAC
CAGCACGCCACAGATACCGCCGACGAGAAGCCCAGAGCCGCTTCTCCAGCCCTGAGCGACGCCAGCGG
ACCTCCTACCCCTGACATCCCCCTGTCTCCTGGCGGCACCCACGCCAGAGATCCTGATGCTGATCCTGACT
CTCCAGACCTGGACAGCTCCGGCTCCGAGACTCCTGGAACAAGCGAGAGCGCTACACCTGAGGGAAAA
GGCGACCCCAAGAAACCTAGAGGCAAGATGAGCAGCTACGCCTTTTTCGTGCAGACCTGTCGGGAAGAG
CACAAGAAAAAGCACCCTGACGCCAGCGTGAACTTCTCTGAGTTCAGCAAGAAGTGCAGCGAGAGATGG
AAaACAATGTCCGCCAAGGAAAAGGGCAAGTTCGAGGACATGGCCAAGGCTGATAAGGCCAGATACGA
GCGGGAAATGAAAACCTACATCCCACCTAAGGGCGAGGGCGGATCTGGCAAAAGAACCGCTGATGGCA
GCGAGTTCGAGAGCCCCAAGAAAAAGAGAAAGGTGtaaGCTGCAATTGCCTCTTTGAATATCACACTAAT
TGTACAAAAAAAAAAAAAAAAAAAAAAAAAACTACTAACACTTCCCTTCTTAGACTTTACAGACCGCGGC
CTACTCGGATCCAAAAAAAAAAAAAAAAAAAAAAAAAAAAAAaacgttGACTAAAAAAAAAAAAAAAAAAA
AAAAAAAAAAAAAAAAAAAAAAAAAAAAAAAAAAAAAAAAAAAAAAAAAAAaaaagcGTCTTCGCGCGCA
TCATCGGATGCCGGGACCGACGAGTGCAGAGGCGTGCAAGCGAGCTTGGCGTAATCATGGTCATAGCT
GTTTCCTGTGTGAAATTGTTATCCGCTCACAATTCCACACAACATACGAGCCGGAAGCATAAAGTGTAAA
GCCTGGGGTGCCTAATGAGTGAGCTAACTCACATTAATTGCGTTGCGCTCACTGCCCGCTTTCCAGTCGG
GAAACCTGTCGTGCCAGCTGCATTAATGAATCGGCCAACGCGCGGGGAGAGGCGGTTTGCGTATTGGG
CGCTCTTCCGCTTCCTCGCTCACTGACTCGCTGCGCTCGGTCGTTCGGCTGCGGCGAGCGGTATCAGCTC
ACTCAAAGGCGGTAATACGGTTATCCACAGAATCAGGGGATAACGCAGGAAAGAACATGTGAGCAAAA
GGCCAGCAAAAGGCCAGGAACCGTAAAAAGGCCGCGTTGCTGGCGTTTTTCCATAGGCTCCGCCCCCCT
GACGAGCATCACAAAAATCGACGCTCAAGTCAGAGGTGGCGAAACCCGACAGGACTATAAAGATACCAG
GCGTTTCCCCCTGGAAGCTCCCTCGTGCGCTCTCCTGTTCCGACCCTGCCGCTTACCGGATACCTGTCCGC
CTTTCTCCCTTCGGGAAGCGTGGCGCTTTCTCATAGCTCACGCTGTAGGTATCTCAGTTCGGTGTAGGTC
GTTCGCTCCAAGCTGGGCTGTGTGCACGAACCCCCCGTTCAGCCCGACCGCTGCGCCTTATCCGGTAACT
ATCGTCTTGAGTCCAACCCGGTAAGACACGACTTATCGCCACTGGCAGCAGCCACTGGTAACAGGATTAG
CAGAGCGAGGTATGTAGGCGGTGCTACAGAGTTCTTGAAGTGGTGGCCTAACTACGGCTACACTAGAAG
AACAGTATTTGGTATCTGCGCTCTGCTGAAGCCAGTTACCTTCGGAAAAAGAGTTGGTAGCTCTTGATCC
GGCAAACAAACCACCGCTGGTAGCGGTGGTTTTTTTGTTTGCAAGCAGCAGATTACGCGCAGAAAAAAA
GGATCTCAAGAAGATCCTTTGATCTTTTCTACGGGGTCTGACGCTCAGTGGAACGAAAACTCACGTTAAG
GGATTTTGGTCATGAGATTATCAAAAAGGATCTTCACCTAGATCCTTTTAAATTAAAAATGAAGTTTTAAA
TCAATCTAAAGTATATATGAGTAAACTTGGTCTGACAGTTACCAATGCTTAATCAGTGAGGCACCTATCTC
AGCGATCTGTCTATTTCGTTCATCCATAGTTGCCTGACTCCCCGTCGTGTAGATAACTACGATACGGGAG
GGCTTACCATCTGGCCCCAGTGCTGCAATGATACCGCGAGACCCACGCTCACCGGCTCCAGATTTATCAG
CAATAAACCAGCCAGCCGGAAGGGCCGAGCGCAGAAGTGGTCCTGCAACTTTATCCGCCTCCATCCAGT
CTATTAATTGTTGCCGGGAAGCTAGAGTAAGTAGTTCGCCAGTTAATAGTTTGCGCAACGTTGTTGCCAT
TGCTACAGGCATCGTGGTGTCACGCTCGTCGTTTGGTATGGCTTCATTCAGCTCCGGTTCCCAACGATCA
AGGCGAGTTACATGATCCCCCATGTTGTGCAAAAAAGCGGTTAGCTCCTTCGGTCCTCCGATCGTTGTCA
GAAGTAAGTTGGCCGCAGTGTTATCACTCATGGTTATGGCAGCACTGCATAATTCTCTTACTGTCATGCCA
TCCGTAAGATGCTTTTCTGTGACTGGTGAGTACTCAACCAAGTCATTCTGAGAATAGTGTATGCGGCGAC
CGAGTTGCTCTTGCCCGGCGTCAATACGGGATAATACCGCGCCACATAGCAGAACTTTAAAAGTGCTCAT
CATTGGAAAACGTTCTTCGGGGCGAAAACTCTCAAGGATCTTACCGCTGTTGAGATCCAGTTCGATGTAA
CCCACTCGTGCACCCAACTGATCTTCAGCATCTTTTACTTTCACCAGCGTTTCTGGGTGAGCAAAAACAGG
AAGGCAAAATGCCGCAAAAAAGGGAATAAGGGCGACACGGAAATGTTGAATACTCATACTCTTCCTTTTT
CAATATTATTGAAGCATTTATCAGGGTTATTGTCTCATGAGCGGATACATATTTGAATGTATTTAGAAAAA
TAAACAAATAGGGGTTCCGCGCACATTTCCCCGAAAAGTGCCACCTGACGTCTAAGAAACCATTATTATC
ATGACATTAACCTATAAAAATAGGCGTATCACGAGGCCCTTTCGTC

[0638] EX2200: Plasmid encoding ZFL2-2 driver with N-terminal HMGN1, D64K, N647K, M750L, and I343K mutations, C-terminal UL12 fusion followed by C-terminal HMGB1 fusion. mRNA cassette (bold) contains Clean Cap-compatible T7 RNA promoter (TriLink Biotechnologies) and A30N10A70 polyA tail.

(SEQ ID NO: 325)
TCGCGCGTTTCGGTGATGACGGTGAAAACCTCTGACACATGCAGCTCCCGGAGACGGTCACAGCTTGTCT
GTAAGCGGATGCCGGGAGCAGACAAGCCCGTCAGGGCGCGTCAGCGGGTGTTGGCGGGTGTCGGGGC
TGGCTTAACTATGCGGCATCAGAGCAGATTGTACTGAGAGTGCACCATATGCGGTGTGAAATACCGCAC
AGATGCGTAAGGAGAAAATACCGCATCAGGCGCCATTCGCCATTCAGGCTGCGCAACTGTTGGGAAGGG
CGATCGGTGCGGGCCTCTTCGCTATTACGCCAGCTGGCGAAAGGGGGATGTGCTGCAAGGCGATTAAGT
TGGGTAACGCCAGGGTTTTCCCAGTCACGACGTTGTAAAACGACGGCCAGTGAATTGGAGATCGGTACT
TCGCGAATGCGTCGAGATTGCAGGGTCGACTAATACGACTCACTATAAGGAGAGATATCCCTAGCTAGTT
CACCGCGGCAGCGGTCGCGGCAGCCTCGTGTGAgGACCGACGAGGGTAAAGACCATCGACTCTACCTGC
GCGACTCCACCGAGCAAAGACACCGACAAAGCACTTGAGTACTTTACTTTATTGTTTTACTTTACACTTAT
TTTTTGTTGTCAGTGCACTTTTATTATGCCTAAGAGAAAGGTGTCCAGCGCCGAGGGCGCTGCCAAGGAA
GAGCCTAAACGGAGAAGCGCCAGACTGAGCGCCAAGCCCCCCGCCAAGGTGGAAGCCAAGCCTAAGAA
GGCCGCCGCTAAGGACAAGAGCAGCGATAAGAAAGTCCAGACCAAGGGCAAGCGGGGCGCCAAAGGC
AAACAGGCCGAGGTGGCCAACCAGGAGACAAAGGAAGATCTGCCTGCTGAGAACGGCGAAACCAAGAC
CGAGGAATCTCCAGCTTCTGACGAGGCCGGAGAGAAGGAGGCCAAAAGCGACAGCGGCTCTGAGACAC
CTGGAACAAGCGAGAGCGCCACCCCGGAATCCTGTTTTCTAATTCCTGTTGTTACTAACACTCGCAAAAC
ACGGGAGGTACGCTGCAAGCGTAATCCTCACAACCTTCGTTCAATACATGTATCTACTATTTCACAACTCT
CTCTCTCCGTGGGCCTCTGGAATTGTCAATCAGCTGTTAACAAGGCTGATTTTATTACCTCCATAGCTACA
TATTCTaagTATAATCTCATGGCTCTAACTGAGACCTGGTTGAGGCCGGAGGACACTGCTACACATGCTAC
TCTTTCTGCTAATTTCTCTTTTTCCCACACTCCTCGTCAGACAGGGAGAGGGGGTGGGACTGGACTACTAA
TTTCCAAAGAATGGAAATTTACTCTGATACCGTCCCTGCCAACAATCAGCTCCTTTGAATTCCATGCAGTC
ACCATTATCCACCCCTTCTACATAAATGTGGTTGTCATCTACCGCCCACCAGGTAAATTAGGTCACTTCCTA
GATGAACTGGATGTTCTTCTCTCATCTTTTTCTAATTTTGACACTCCCTTATTGGTGCTAGGTGACTTCAAC
ATTTACGTTGACAAACCGCAAGCTGCAGACTTTCAGACTTTGCTTGCCTCTTTTGACCTAAAAAGAGCACC
TACTTCTGCTACCCACAAATCAGGTAATCAGCTAGACCTTATTTACACACGACACTGCTTCACTGATCAAA
CAATAGTAACTCCACTACAAATATCTGATCATTTCCTTCTGTCTCTCAACATCCACATTACTCCTGAGCCGC
CACACACTCCTACACTGGTTACCTTTCGCAGAAACCTACGATCTCTCTCACCCAATAGACTATCCACCATTG
TTTCAGACTCTCTTCCTCCATCTCGCAAACTCACTGCACTTGATTCGAACAGTGCCACTAATACACTCTGCT
CCACACTAGCATCATGTCTAGACCGATTATGTCCTCTTGCATCCAGGCCAGCCCGTGCCAGTCCTCCTGCA
CCCTGGCTCTCGGATGCTCTCCGTGAGCATCGCTCAAAACTTCGGGCTGCGGAGAGAaagTGGCGGAAA
ACTAAAAATCCTGCACATCTCTTAACATACCAAACTCTTCTGTCCTCTTTCTCAGCTGAGGTTACTTCTGCA
AAGCAGACGTATTACCGTCTGAAAATCAACAATGCCACTAATCCTCGCCTACTTTTTAAAACATTTTCCTCC
CTCCTATATCCTCCTCCTCCACCCGCATCCTCCACACTTACTACTGATGACTTTGCTACATTCTTCTGCACCA
AAACTGCAAAAATCAGTGCTCAATTTGCTGCACCTACAACAAACACGCAAGATACAACACCAACACCACA
CACACTCACCTCTTTTTCTCAGCTCTCTGAGTCTGAGGTGTCCAAACTTGTGCTATCTAGCCATGCAACCAC
CTGTCCACTCGATCCCATTCCCTCTCATCTCTTGCAAGCCATCTCTCCTGCAGTCATACCAACACTGACTCA
CATAATTAACACATCTCTTGACTCTGGTTTATTCCCCACTACATTTAAGCAGGCTAGGGTAACCCCACTGC
TAAAGAAACCCAACCTGGACCATACGCTACTTGAAAACTACAGACCAGTATCCCTGCTTCCATTCATGGCC
AAGATTCTGGAGAAAGTAGTGTTCAATCAAGTCCTGGACTTTCTTACTCAAAACAATCTCATGGACAACA
AGCAATCCGGCTTTAAGAAAGGCCACTCAACTGAGACTGCCCTGCTCTCGGTCGTGGAGGATCTCAGACT
GGCTAAAGCAGACTCTAAATCATCAGTCCTCATTTTGCTGGACTTGTCAGCTGCTTTTGACACTGTCAACC
ACCAGATCCTGCTATCTACGCTTGAGTCACTGGGCGTTGCGGGCACTGTTATACAATGGTTTAGATCTTA
CCTCTCTGACAGGTCATTCAGGGTGTCTTGGAGGGGAGAGGTGTCCaagCTACAGCATCTAAACACTGGG
GTACCTCAAGGCTCTGTTCTTGGGCCACTTCTCTTCTCCATCTACACATCATCTCTAGGACCAGTCATCCAG
AGACATGGATTCTCCTACCACTGCTATGCTGATGACACCCAGCTATACCTCTCTTTTCATCCTGATGATCCC
TCGGTTCCAGCTCGTATCTCAGCCTGCCTGTTGGATATTTCACACTGGATGAAAGATCATCATCTTCAGCT
GAACCTCGCAAAAACGGAAATGCTTGTAGTTTCTGCCAACCCGACTCTACACCATAACTTTTCAATCCAGc
tgGATGGGGCAACCATTACTGCATCCAAAATGGTGAAAAGCCTTGGAGTAACGATTGATGACCAACTAAA
CTTCTCTGACCACATTTCTAGAACTGCTCGATCGTGCAGATTTGCACTCTATAACATCAGAAAGATCCGAC
CCTTCTTATCTGAACATGCAGCTCAACTCCTTGTTCAAGCTCTTGTTCTCTCCAAACTGGATTACTGCAACT
CTCTACTAGCTTTGCTTCCAGCTAACTCTATCAAGCCTCTTCAACTGCTCCAGAATGCAGCAGCACGAGTT
GTgTTCAATGAACCTAAACGAGCACATGTCACTCCGCTGCTAGTCCGTTTGCACTGGCTGCCAGTTGCTGC
TCGCATCAAATTCAAAACTCTGATGTTTGCCTACAAAGTGACTTCTGGCCTAGCACCTTCTTATCTGCACTC
ACTTCTGCAGATCTATGTGCCCTCCAGAAACTTGCGTTCTGTGAATGAACGTCGCCTCGTGGTTCCATCCC
AAAGAGGGAAAAAATCACTTTCGCGAACGCTCACGCTCAATCTGCCCAGTTGGTGGAATGAACTCCCTAA
CTGCATCAGAACAGCAGAGTCACTCGCTATTTTCAAGAAACGACTAAAAACTCAACTATTTAGTCTCCACT
TCACTTCCTCCGGCTCCGAGACTCCTGGAACAAGCGAGAGCGCTACACCTGAGGGCAGCGAAAGCACAG
TCGGCCCTGCTTGCCCCCCAGGAAGAACCGTGACCAAGCGGCCCTGGGCCCTGGCCGAGGACACCCCTA
GGGGCCCCGATAGCCCCCCCAAAAGACCCCGGCCTAACAGCCTGCCTCTGACCACAACATTCAGACCTCT
GCCTCCTCCACCTCAGACCACCAGCGCCGTGGACCCTAGCAGCCACTCCCCTGTGAACCCCCCTCGGGAC
CAGCACGCCACAGATACCGCCGACGAGAAGCCCAGAGCCGCTTCTCCAGCCCTGAGCGACGCCAGCGG
ACCTCCTACCCCTGACATCCCCCTGTCTCCTGGCGGCACCCACGCCAGAGATCCTGATGCTGATCCTGACT
CTCCAGACCTGGACAGCTCCGGCTCCGAGACTCCTGGAACAAGCGAGAGCGCTACACCTGAGGGAAAA
GGCGACCCCAAGAAACCTAGAGGCAAGATGAGCAGCTACGCCTTTTTCGTGCAGACCTGTCGGGAAGAG
CACAAGAAAAAGCACCCTGACGCCAGCGTGAACTTCTCTGAGTTCAGCAAGAAGTGCAGCGAGAGATGG
AAaACAATGTCCGCCAAGGAAAAGGGCAAGTTCGAGGACATGGCCAAGGCTGATAAGGCCAGATACGA
GCGGGAAATGAAAACCTACATCCCACCTAAGGGCGAGGGCGGATCTGGCAAAAGAACCGCTGATGGCA
GCGAGTTCGAGAGCCCCAAGAAAAAGAGAAAGGTGtaaGCTGCAATTGCCTCTTTGAATATCACACTAAT
TGTACAAAAAAAAAAAAAAAAAAAAAAAAAACTACTAACACTTCCCTTCTTAGACTTTACAGACCGCGGC
CTACTCGGATCCAAAAAAAAAAAAAAAAAAAAAAAAAAAAAAaacgttGACTAAAAAAAAAAAAAAAAAAA
AAAAAAAAAAAAAAAAAAAAAAAAAAAAAAAAAAAAAAAAAAAAAAAAAAAaaaagcGTCTTCGCGCGCA
TCATCGGATGCCGGGACCGACGAGTGCAGAGGCGTGCAAGCGAGCTTGGCGTAATCATGGTCATAGCT
GTTTCCTGTGTGAAATTGTTATCCGCTCACAATTCCACACAACATACGAGCCGGAAGCATAAAGTGTAAA
GCCTGGGGTGCCTAATGAGTGAGCTAACTCACATTAATTGCGTTGCGCTCACTGCCCGCTTTCCAGTCGG
GAAACCTGTCGTGCCAGCTGCATTAATGAATCGGCCAACGCGCGGGGAGAGGCGGTTTGCGTATTGGG
CGCTCTTCCGCTTCCTCGCTCACTGACTCGCTGCGCTCGGTCGTTCGGCTGCGGCGAGCGGTATCAGCTC
ACTCAAAGGCGGTAATACGGTTATCCACAGAATCAGGGGATAACGCAGGAAAGAACATGTGAGCAAAA
GGCCAGCAAAAGGCCAGGAACCGTAAAAAGGCCGCGTTGCTGGCGTTTTTCCATAGGCTCCGCCCCCCT
GACGAGCATCACAAAAATCGACGCTCAAGTCAGAGGTGGCGAAACCCGACAGGACTATAAAGATACCAG
GCGTTTCCCCCTGGAAGCTCCCTCGTGCGCTCTCCTGTTCCGACCCTGCCGCTTACCGGATACCTGTCCGC
CTTTCTCCCTTCGGGAAGCGTGGCGCTTTCTCATAGCTCACGCTGTAGGTATCTCAGTTCGGTGTAGGTC
GTTCGCTCCAAGCTGGGCTGTGTGCACGAACCCCCCGTTCAGCCCGACCGCTGCGCCTTATCCGGTAACT
ATCGTCTTGAGTCCAACCCGGTAAGACACGACTTATCGCCACTGGCAGCAGCCACTGGTAACAGGATTAG
CAGAGCGAGGTATGTAGGCGGTGCTACAGAGTTCTTGAAGTGGTGGCCTAACTACGGCTACACTAGAAG
AACAGTATTTGGTATCTGCGCTCTGCTGAAGCCAGTTACCTTCGGAAAAAGAGTTGGTAGCTCTTGATCC
GGCAAACAAACCACCGCTGGTAGCGGTGGTTTTTTTGTTTGCAAGCAGCAGATTACGCGCAGAAAAAAA
GGATCTCAAGAAGATCCTTTGATCTTTTCTACGGGGTCTGACGCTCAGTGGAACGAAAACTCACGTTAAG
GGATTTTGGTCATGAGATTATCAAAAAGGATCTTCACCTAGATCCTTTTAAATTAAAAATGAAGTTTTAAA
TCAATCTAAAGTATATATGAGTAAACTTGGTCTGACAGTTACCAATGCTTAATCAGTGAGGCACCTATCTC
AGCGATCTGTCTATTTCGTTCATCCATAGTTGCCTGACTCCCCGTCGTGTAGATAACTACGATACGGGAG
GGCTTACCATCTGGCCCCAGTGCTGCAATGATACCGCGAGACCCACGCTCACCGGCTCCAGATTTATCAG
CAATAAACCAGCCAGCCGGAAGGGCCGAGCGCAGAAGTGGTCCTGCAACTTTATCCGCCTCCATCCAGT
CTATTAATTGTTGCCGGGAAGCTAGAGTAAGTAGTTCGCCAGTTAATAGTTTGCGCAACGTTGTTGCCAT
TGCTACAGGCATCGTGGTGTCACGCTCGTCGTTTGGTATGGCTTCATTCAGCTCCGGTTCCCAACGATCA
AGGCGAGTTACATGATCCCCCATGTTGTGCAAAAAAGCGGTTAGCTCCTTCGGTCCTCCGATCGTTGTCA
GAAGTAAGTTGGCCGCAGTGTTATCACTCATGGTTATGGCAGCACTGCATAATTCTCTTACTGTCATGCCA
TCCGTAAGATGCTTTTCTGTGACTGGTGAGTACTCAACCAAGTCATTCTGAGAATAGTGTATGCGGCGAC
CGAGTTGCTCTTGCCCGGCGTCAATACGGGATAATACCGCGCCACATAGCAGAACTTTAAAAGTGCTCAT
CATTGGAAAACGTTCTTCGGGGCGAAAACTCTCAAGGATCTTACCGCTGTTGAGATCCAGTTCGATGTAA
CCCACTCGTGCACCCAACTGATCTTCAGCATCTTTTACTTTCACCAGCGTTTCTGGGTGAGCAAAAACAGG
AAGGCAAAATGCCGCAAAAAAGGGAATAAGGGCGACACGGAAATGTTGAATACTCATACTCTTCCTTTTT
CAATATTATTGAAGCATTTATCAGGGTTATTGTCTCATGAGCGGATACATATTTGAATGTATTTAGAAAAA
TAAACAAATAGGGGTTCCGCGCACATTTCCCCGAAAAGTGCCACCTGACGTCTAAGAAACCATTATTATC
ATGACATTAACCTATAAAAATAGGCGTATCACGAGGCCCTTTCGTC

[0639] FIG. 5 shows results of integration assays using drivers with combinations of domain fusions and point mutations. In this experiment, different retrotransposable element constructs were used in the trans configuration (driver and GFP reporter encoded by different RNA). A common gene delivery construct encoding the GFP reporter (EX2107; SEQ ID NO: 319) was used for all driver constructs tested. Aside from the mutations and fusions listed, all constructs were identical in sequence to SM002. IVT of different RTE constructs was carried out as described above. U20S cells were used in 24-well plate, at 120K cells/well. 1000 ng RNA was transfected with 1.2 uL Lipofectamine. Integration was assessed based on the percentage of GFP positive cells (% GFP positive cells) after 24 h, with a higher percentage of GFP positive cells being indicative of higher levels of integration. % GFP positive cells was assessed by FACS following 24 hours after transfection with RNA.

[0640] It was observed that by combining multiple different modifications targeting different retrotransposable element functions, significant improvements in integration is possible. Combining UL12 (hypothesized to interact with cellular DNA repair), with HMG domains (hypothesized to improve chromatin binding and/or accessibility), with N647K mutation (hypothesized to improve reverse transcriptase domain activity/stability) (SEQ ID:321) lead to approximately 7-fold improvement in integration activity. Further adding I343K mutation (hypothesized to improve RNA binding) (SEQ ID:322) to this construct improved integration activity slightly by almost another fold. Further adding D64K mutation (hypothesized to improve endonuclease binding to DNA) to this construct (SEQ ID:323) improved activity by another fold (EX2196). Further adding L825G mutation (hypothesized to improve reverse transcriptase stability/activity) to this construct (SEQ ID:324) improved activity by almost another 3-fold. Adding M750L (hypothesized to improve reverse transcriptase stability/activity) instead of L825G (SEQ ID:325) also improved activity but only by ˜1-fold.

[0641] Altogether, approximately 12-fold improvement was demonstrated in integration activity of a non-LTR retrotransposable element through combination of domain fusions and mutations.

### Example 7

[0642] In order to test the effect of domain additions and mutations on improving integration efficiency of another LINE element, known as Vingi. Vingi-1 was taken from the genome of Anolis carolinensis. The driver and GFP reporter were configured in trans, transcribed as mRNA from plasmid DNA.

[0643] An exemplary Vingi-1 driver comprising Wild-type Vingi-1_Acar retrotransposon is encoded by EX2985 plasmid (SEQ ID NO: 326), with mRNA cassette containing Clean Cap-compatible T7 RNA promoter (TriLink Biotechnologies, bold) and A30N10A70 polyA tail (underlined). Vingi-1_Acar protein ORF is underlined and in italics. In between the T7 RNA promoter and ORF is the 5′UTR of Vingi-1 retrotransposon.

### EX2985:

(SEQ ID NO: 326)
TCGCGCGTTTCGGTGATGACGGTGAAAACCTCTGACACATGCAGCTCCCGGAGACGGTCACAGCTTGTCT
GTAAGCGGATGCCGGGAGCAGACAAGCCCGTCAGGGCGCGTCAGCGGGTGTTGGCGGGTGTCGGGGC
TGGCTTAACTATGCGGCATCAGAGCAGATTGTACTGAGAGTGCACCATATGCGGTGTGAAATACCGCAC
AGATGCGTAAGGAGAAAATACCGCATCAGGCGCCATTCGCCATTCAGGCTGCGCAACTGTTGGGAAGGG
CGATCGGTGCGGGCCTCTTCGCTATTACGCCAGCTGGCGAAAGGGGGATGTGCTGCAAGGCGATTAAGT
TGGGTAACGCCAGGGTTTTCCCAGTCACGACGTTGTAAAACGACGGCCAGTGAATTGGAGATCGGTACT
TCGCGAGTTTAAACTAATACGACTCACTATAAGGGGGGGACACGGAAAGAGCCTCCCCGAAGATTGAGT
gAATTCAGTCGGGCGTCCCCTGGGCAACGTTTCTTGTAAGCGGCCGATCTTTCCAcCCCAAAAGCATTGG
ATGaATGGATGAATACCAAAGGTCTTTATCAAGACCATTGCTAACGATTATGTCTATTAATATAGAAGGTT
TGTCACTTGCTAAGGAAGAACTATTAGCCAAAATGTCTGAGGACATcTCgTGTGACATCCTATGTATACAG
GAAACACACAGAGACATCACAATGAGgAGACCAAAAATTCTTGGAATGCAaCTGGCAGTGGAACGACCTC
ACAGaCAATATGGCAGTGCCATTTTTGTACGATCTGGTGTAGCAATCTCTGCAAcTTCCCTCACAGAAGtG
AACAACATTGAAATCTTATCTGTGGAACTTGATaGTTGCACCGTATCATCACTCTATAAACCACCTGGGGCT
GATTTCTATTTTACaCCCCCAACCAgTTGCCACAATCATGAAGCCCATTTTGTTGTGGGAGATTTCAATAGC
CACAGCTGTGTCTGGGGCTATGACGAAGATGATAGAAATGGCgAAGCAGTTCTAACGTGGGCcGACAAT
AGTAGAATGAGCCTCCTTCATGACAGTAAATTACCACCATCATTTAATAGCGGCCGATGGAAGCGTGGTT
ATAACCCTGATCTGATTTTTGTAAAGGAAAGCATAAGCCACCAATGCACCAAAAGGGTATTAAACCCaATA
CCTAACACACAACACAGACCAATATGCTGCGTAGCATATGCAGCTGTAAGACCgAAAAGTGTCCCATTCCG
CAGAAGATttaacttcaATAAAGCTAACTGGACAAAGTTTACAGAGACCttGGaAGCTGCTATTTCTGATATA
GAACCTTCTATAGAAAATTATGACCTGTTcGTAGAAGCTGTGAAAAGATCCTCAAGGCTCTCAATCCCTAG
AGGCTGTCGCACAAGCTaCCTACCAGGCCTAAACGAAGAATCaCTAAATCAGCTACAaGAATATCTCAGAt
TATTTCAAGAGAAcCCATACAGTGATGGGACTATAGCAGCAGGCCAAAAACTATCTACAGCCTTAGCTAAT
GCTAAGAAAGACCGTTGGATAGAGCTGCTTGAGAACCTgGACATGTCCAAGAGTAGCCGAAAAGCCTGG
CAAtTGCTGAGAcGCCTGGATAGTGACCCTCTGGTCAACCcTGGACACGCgAACGTGACACCAGAtCAGAT
AGCTCACCAGCTAATTCAGAATGGGAAAACCAACTGCAGCAGAATAAAGATGAAAATCAACAGGGTGCC
AGAACTTGAAACCCACCAGTTGTCcTCTCCTCTAAACCTGAAAGAACTCAGAGAAGCCATCAAGCGATGTA
AGACTGGTAAAGCACCTGGCCTAGATGACCTGATGATGGAGCAAATCAAACACTTGGGgcCCAAAGCTGA
AAACTGGCTTTTGAAATTCTACAATCAATGCcTGGCACACAAACAGATTCCCAGAGCATGGAGGAAAACT
AAGATaATTGCCATcTTAAAACCTGGTAAAGATGCCTCCAATGCCAGGAACTAtCGACCAATCTCCCTCTTA
TGTCATCTATATAAAGTCTATGAGAGGATGCTATTAAATCGACTAGGACCTGTTATCGAACCCAAGCTTAT
TGCACAACAAGCAGGTTTCAGACCAGGGAAAAACTGTACAGGTCAAATTCTTCATCTGACTGAACATATC
GAGGAAGGCTAtGAGAAAGGCTGCATtACGGGAACAGTcTTTGTGGACCTTACGGCAGCCTATGACACGG
TGCAACATAGAAAAATGCTGCATAAAGTCTACCATATCACCCGGGACTTTGACTTTACAAAAACTGTCCAG
ACCCTCtTAGAAAACCgCAGCTTCTATGTGGAGTTTCAGGGCCAGAAAAGCAGATGGAGGAGGCAAAAG
AATGGTTTACCCCAAGGCAGCGTTCTTGCACCaACCTTATTTAAcATCTTCACGAACGATCAGCCACAACCA
CCACTCACAAAGAGCTTTATATATGCTGATGACCTTGGCCTTACAACACAAGCAAAAGATTTTGAAACAGT
TGAAAAGCAACTCACCAATGCCTTGAAAGAtCTCTCCAGCTACTACAAAGAGAACCACCTGAAGCCtAACC
CTGCCAAGACACAAGTGTGTGCTTTCCACCTACGTAACCGCGAAGCCAACAGGaAACTGAAAGTTACTTG
GGAAGGCCAAGAGCTCGAACACTGTTTCCATCCTAAATACCTTGGTGTCACCTTAGACCGAACACTAACAT
ATAGGAAACACTGCATGAACACCAAGCACAAAGTAGCTGCACGCAATAACATCCTGCGGAAACTGACTG
GCAGCGCATGGGGaGCAGACCCACAAGTAATAAGAACATCAGCCCTGGCCTTGTCTTTCTCAACTGCAGA
GTATGCCTGTCCTGTTTGGCACAAGTCTGCCCATGCaAAGCAGGTGGACATAGCACTGAATGAAACATGC
AGAATcATCACgGGATGCCTTAAACCTACACCTGTTGATAAACTCTACAAGTTAGCTGGCATTGCCCCTCCT
GACGTGCGACGGGAAGTTGCTGCTAACgGTGAGAGAAAaAAGGTcGAACATTGTGAAAGCCACCCACTG
CATGgCTATCAcCCTCCTCCCACCAGACTCAAATCAAGGAAGGGCTTCATGAGAACCACCACTCCTCTTGAT
GTTCCTCCAGCAgCAGCAAGGGTGTCcCTCTGGGCAGCTAAACCTGGCAATTCTAACTGGATGGCCCCCC
AaGAGGGaCTTCCTCCAGGGGCAAACCAaGAATGGGCAACTTGGAAGTCCCTGAACAGACTCAGAAGtG
GAGTGGGCAGATCAAAAGACAACTTGGCAAGGTGGCACTACCTGGAGGAATCCTCCACCTTGTGTGACT
GTGGAGCtGAACAAACAACTCaGCATATGTATGCTTGCCCACAATGcCCTGCCTCATGtACGGAGGAGGA
GTTGTTTAAAGCTACaGACAATGCGGTTGCTGTTGCCCGCTTTTGGTCCAAAACTATTTAGGTCGACgctag
cACCGGTAAAAAAAAAAAAAAAAAAAAAAAAAAAAAAaacgttGACTAAAAAAAAAAAAAAAAAAAAAAA
AAAAAAAAAAAAAAAAAAAAAAAAAAAAAAAAAAAAAAAAAAAAAAAaaaaaaGTCTTCGCGCGCATCAT
CGGATGCCGGGACCGACGAGTGCAGAGGCGTGCAAGCGAGCTTGGCGTAATCATGGTCATAGCTGTTT
CCTGTGTGAAATTGTTATCCGCTCACAATTCCACACAACATACGAGCCGGAAGCATAAAGTGTAAAGCCT
GGGGTGCCTAATGAGTGAGCTAACTCACATTAATTGCGTTGCGCTCACTGCCCGCTTTCCAGTCGGGAAA
CCTGTCGTGCCAGCTGCATTAATGAATCGGCCAACGCGCGGGGAGAGGCGGTTTGCGTATTGGGCGCTC
TTCCGCTTCCTCGCTCACTGACTCGCTGCGCTCGGTCGTTCGGCTGCGGCGAGCGGTATCAGCTCACTCA
AAGGCGGTAATACGGTTATCCACAGAATCAGGGGATAACGCAGGAAAGAACATGTGAGCAAAAGGCCA
GCAAAAGGCCAGGAACCGTAAAAAGGCCGCGTTGCTGGCGTTTTTCCATAGGCTCCGCCCCCCTGACGA
GCATCACAAAAATCGACGCTCAAGTCAGAGGTGGCGAAACCCGACAGGACTATAAAGATACCAGGCGTT
TCCCCCTGGAAGCTCCCTCGTGCGCTCTCCTGTTCCGACCCTGCCGCTTACCGGATACCTGTCCGCCTTTC
TCCCTTCGGGAAGCGTGGCGCTTTCTCATAGCTCACGCTGTAGGTATCTCAGTTCGGTGTAGGTCGTTCG
CTCCAAGCTGGGCTGTGTGCACGAACCCCCCGTTCAGCCCGACCGCTGCGCCTTATCCGGTAACTATCGT
CTTGAGTCCAACCCGGTAAGACACGACTTATCGCCACTGGCAGCAGCCACTGGTAACAGGATTAGCAGA
GCGAGGTATGTAGGCGGTGCTACAGAGTTCTTGAAGTGGTGGCCTAACTACGGCTACACTAGAAGAACA
GTATTTGGTATCTGCGCTCTGCTGAAGCCAGTTACCTTCGGAAAAAGAGTTGGTAGCTCTTGATCCGGCA
AACAAACCACCGCTGGTAGCGGTGGTTTTTTTGTTTGCAAGCAGCAGATTACGCGCAGAAAAAAAGGAT
CTCAAGAAGATCCTTTGATCTTTTCTACGGGGTCTGACGCTCAGTGGAACGAAAACTCACGTTAAGGGAT
TTTGGTCATGAGATTATCAAAAAGGATCTTCACCTAGATCCTTTTAAATTAAAAATGAAGTTTTAAATCAAT
CTAAAGTATATATGAGTAAACTTGGTCTGACAGTTACCAATGCTTAATCAGTGAGGCACCTATCTCAGCG
ATCTGTCTATTTCGTTCATCCATAGTTGCCTGACTCCCCGTCGTGTAGATAACTACGATACGGGAGGGCTT
ACCATCTGGCCCCAGTGCTGCAATGATACCGCGGGACCCACGCTCACCGGCTCCAGATTTATCAGCAATA
AACCAGCCAGCCGGAAGGGCCGAGCGCAGAAGTGGTCCTGCAACTTTATCCGCCTCCATCCAGTCTATTA
ATTGTTGCCGGGAAGCTAGAGTAAGTAGTTCGCCAGTTAATAGTTTGCGCAACGTTGTTGCCATTGCTAC
AGGCATCGTGGTGTCACGCTCGTCGTTTGGTATGGCTTCATTCAGCTCCGGTTCCCAACGATCAAGGCGA
GTTACATGATCCCCCATGTTGTGCAAAAAAGCGGTTAGCTCCTTCGGTCCTCCGATCGTTGTCAGAAGTA
AGTTGGCCGCAGTGTTATCACTCATGGTTATGGCAGCACTGCATAATTCTCTTACTGTCATGCCATCCGTA
AGATGCTTTTCTGTGACTGGTGAGTACTCAACCAAGTCATTCTGAGAATAGTGTATGCGGCGACCGAGTT
GCTCTTGCCCGGCGTCAATACGGGATAATACCGCGCCACATAGCAGAACTTTAAAAGTGCTCATCATTGG
AAAACGTTCTTCGGGGCGAAAACTCTCAAGGATCTTACCGCTGTTGAGATCCAGTTCGATGTAACCCACT
CGTGCACCCAACTGATCTTCAGCATCTTTTACTTTCACCAGCGTTTCTGGGTGAGCAAAAACAGGAAGGC
AAAATGCCGCAAAAAAGGGAATAAGGGCGACACGGAAATGTTGAATACTCATACTCTTCCTTTTTCAATA
TTATTGAAGCATTTATCAGGGTTATTGTCTCATGAGCGGATACATATTTGAATGTATTTAGAAAAATAAAC
AAATAGGGGTTCCGCGCACATTTCCCCGAAAAGTGCCACCTGACGTCTAAGAAACCATTATTATCATGAC
ATTAACCTATAAAAATAGGCGTATCACGAGGCCCTTTCGTC

An exemplary wild-type Vingi-1 driver encoded by EX2985 plasmid (SEQ ID NO: 326) has the following amino acid sequence (SEQ ID NO: 327):

(SEQ ID NO: 327)
MDEYQRSLSRPLLTIMSINIEGLSLAKEELLAKMSEDISCDILCIQET
HRDITMRRPKILGMQLAVERPHRQYGSAIFVRSGVAISATSLTEVNNI
EILSVELDSCTVSSLYKPPGADFYFTPPTSCHNHEAHFVVGDFNSHSC
VWGYDEDDRNGEAVLTWADNSRMSLLHDSKLPPSFNSGRWKRGYNPDL
IFVKESISHQCTKRVLNPIPNTQHRPICCVAYAAVRPKSVPFRRRFNF
NKANWTKFTETLEAAISDIEPSIENYDLFVEAVKRSSRLSIPRGCRTS
YLPGLNEESLNQLQEYLRLFQENPYSDGTIAAGQKLSTALANAKKDRW
IELLENLDMSKSSRKAWQLLRRLDSDPLVNPGHANVTPDQIAHQLIQN
GKTNCSRIKMKINRVPELETHQLSSPLNLKELREAIKRCKTGKAPGLD
DLMMEQIKHLGPKAENWLLKFYNQCLAHKQIPRAWRKTKIIAILKPGK
DASNARNYRPISLLCHLYKVYERMLLNRLGPVIEPKLIAQQAGFRPGK
NCTGQILHLTEHIEEGYEKGCITGTVFVDLTAAYDTVQHRKMLHKVYH
ITRDFDFTKTVQTLLENRSFYVEFQGQKSRWRRQKNGLPQGSVLAPTL
FNIFTNDQPQPPLTKSFIYADDLGLTTQAKDFETVEKQLTNALKDLSS
YYKENHLKPNPAKTQVCAFHLRNREANRKLKVTWEGQELEHCFHPKYL
GVTLDRTLTYRKHCMNTKHKVAARNNILRKLTGSAWGADPQVIRTSAL
ALSFSTAEYACPVWHKSAHAKQVDIALNETCRIITGCLKPTPVDKLYK
LAGIAPPDVRREVAANGERKKVEHCESHPLHGYHPPPTRLKSRKGFMR
TTTPLDVPPAAARVSLWAAKPGNSNWMAPQEGLPPGANQEWATWKSLN
RLRSGVGRSKDNLARWHYLEESSTLCDCGAEQTTQHMYACPQCPASCT
EEELFKATDNAVAVARFWSKTI

[0644] An exemplary Vingi-1 GFP reporter is encoded by gene delivery construct EX2988 (SEQ ID NO: 328) for use with a Vingi-1 driver, is shown below. The gene delivery construct comprises mRNA cassette containing Clean Cap-compatible T7 RNA promoter (TriLink Biotechnologies, bold) and A30N10A70 polyA tail (underlined). GFP cassette including MNDopt promoter, GFP ORF, and synthetic polyadenylation signal is in anti-sense and in italics. In between the T7 promoter and GFP cassette is the 5′UTR from Vingi-1 element, and in between the GFP cassette and polyA tail is the 3′UTR from Vingi-1 element.

(SEQ ID NO: 328)
TCGCGCGTTTCGGTGATGACGGTGAAAACCTCTGACACATGCAGCTCCCGGAGACGGTCACAGCTTGTCT
GTAAGCGGATGCCGGGAGCAGACAAGCCCGTCAGGGCGCGTCAGCGGGTGTTGGCGGGTGTCGGGGC
TGGCTTAACTATGCGGCATCAGAGCAGATTGTACTGAGAGTGCACCATATGCGGTGTGAAATACCGCAC
AGATGCGTAAGGAGAAAATACCGCATCAGGCGCCATTCGCCATTCAGGCTGCGCAACTGTTGGGAAGGG
CGATCGGTGCGGGCCTCTTCGCTATTACGCCAGCTGGCGAAAGGGGGATGTGCTGCAAGGCGATTAAGT
TGGGTAACGCCAGGGTTTTCCCAGTCACGACGTTGTAAAACGACGGCCAGTGAATTGGAGATCGGTACT
TCGCGAGTTTAAACTAATACGACTCACTATAAGGGGGGGACACGGAAAGAGCCTCCCCGAAGATTGAGT
gAATTCAGTCGGGCGTCCCCTGGGCAACGTTTCTTGTAAGCGGCCGATCTTTCCAcCCCAAAAGCATTGG
ATGaGTCGACGCGGCCTACTCGACGGATCGATCCGAACAAACGACCCAACACCCGTGCGTTTTATTCTGTC
TTTTTATTGCCGATCCCCTCAGAAGAACTCGTCAAGAAGGCGATAGAAGGCGATGCGCTGCGAATCGGG
AGCGGCGATACCGTAAAGCACGAGGAAGCGGTCAGCCCATTCGCCGCCAAGCTCTTCAGCAATATCACG
GGTAGCCAACGCTATGTCCTGATAGCGGTCGGCCGCTTTACTTGTACAGCTCGTCCATGCCGAGAGTGAT
CCCGGCGGCGGTCACGAACTCCAGCAGGACCATGTGATCGCGCTTCTCGTTGGGGTCTTTGCTCAGGGC
GGACTGGGTGCTCAGGTAGTGGTTGTCGGGCAGCAGCACGGGGCCGTCGCCGATGGGGGTGTTCTGCT
GGTAGTGGTCGGCCAGCTGCACGCTGCCGTCCTCGATGTTGTGGCGGATCTTGAAGTTCACCTTGATGCC
GTTCTTCTGCTTGTCGGCCATGATATAGACGTTGTGGCTGTTGTAGTTGTACTCCAGCTTGTGCCCCAGGA
TGTTGCCGTCCTCCTTGAAGTCGATGCCCTTCAGCTCGATGCGGTTCACCAGGGTGTCGCCCTCGAACTTC
ACCTCGGCGCGGGTCTTGTAGTTGCCGTCGTCCTTGAAGAAGATGGTGCGCTCCTGGACGTAGCCTTCGG
GCATGGCGGACTTGAAGAAGTCGTGCTGCTTCATGTGGTCGGGGTAGCGGCTGAAGCACTGCACGCCGT
AGGTCAGGGTGGTCACGAGGGTGGGCCAGGGCACGGGCAGCTTGCCGGTGGTGCAGATGAACTTCAGG
GTCAGCTTGCCGTAGGTGGCATCGCCCTCGCCCTCGCCGGACACGCTGAACTTGTGGCCGTTTACGTCGC
CGTCCAGCTCGACCAGGATGGGCACCACCCCGGTGAACAGCTCCTCGCCCTTGCTCACCATGGTGGCtcga
gaactagatcgcgccgagtgagggttgtgggctcttttattgagctcggggagcagaagcgcgcgaacagaagcgagaagcgaa
ctgattggttagttcaaataaggcacagggtcatttcaggtccttggggcaccctggaaacatctgatggttctctagaaactgctga
gggcgggaccgcatctggggaccatctgttcttggccctgagccggggcaggaactgcttaccacagatatcctgtttggcccatatt
ctgctgttccaactgttcttggccctgagccggggcaggaactgcttaccacagatatcctgtttggcccatattctgctgtctctctgttc
ctaaccttgatcctagcttgccaaacctacaggtggggtctttcattcccccctttttctggagactaaataaaatcttttattctatctat
ggctcgtactctataggcttcagctggtgatattgttgagtcaaaactagagcctggaccactgatatcctgtctttaacaaattggac
taatcgaattcgaagcttTTGCTTGTGATTTCTTTTCTTTTtTaTTTTATTTCCATTATTTGAAATGTATTTGcTGTAc
CAATGCTTTTGACACGAAATAAATAAAgctagcACCGGTAAAAAAAAAAAAAAAAAAAAAAAAAAAAAAaa
cgttGACTAAAAAAAAAAAAAAAAAAAAAAAAAAAAAAAAAAAAAAAAAAAAAAAAAAAAAAAAAAAAAA
AAAAAAAAaaaaaaGTCTTCGCGCGCATCATCGGATGCCGGGACCGACGAGTGCAGAGGCGTGCAAGCG
AGCTTGGCGTAATCATGGTCATAGCTGTTTCCTGTGTGAAATTGTTATCCGCTCACAATTCCACACAACAT
ACGAGCCGGAAGCATAAAGTGTAAAGCCTGGGGTGCCTAATGAGTGAGCTAACTCACATTAATTGCGTT
GCGCTCACTGCCCGCTTTCCAGTCGGGAAACCTGTCGTGCCAGCTGCATTAATGAATCGGCCAACGCGCG
GGGAGAGGCGGTTTGCGTATTGGGCGCTCTTCCGCTTCCTCGCTCACTGACTCGCTGCGCTCGGTCGTTC
GGCTGCGGCGAGCGGTATCAGCTCACTCAAAGGCGGTAATACGGTTATCCACAGAATCAGGGGATAACG
CAGGAAAGAACATGTGAGCAAAAGGCCAGCAAAAGGCCAGGAACCGTAAAAAGGCCGCGTTGCTGGCG
TTTTTCCATAGGCTCCGCCCCCCTGACGAGCATCACAAAAATCGACGCTCAAGTCAGAGGTGGCGAAACC
CGACAGGACTATAAAGATACCAGGCGTTTCCCCCTGGAAGCTCCCTCGTGCGCTCTCCTGTTCCGACCCT
GCCGCTTACCGGATACCTGTCCGCCTTTCTCCCTTCGGGAAGCGTGGCGCTTTCTCATAGCTCACGCTGTA
GGTATCTCAGTTCGGTGTAGGTCGTTCGCTCCAAGCTGGGCTGTGTGCACGAACCCCCCGTTCAGCCCGA
CCGCTGCGCCTTATCCGGTAACTATCGTCTTGAGTCCAACCCGGTAAGACACGACTTATCGCCACTGGCA
GCAGCCACTGGTAACAGGATTAGCAGAGCGAGGTATGTAGGCGGTGCTACAGAGTTCTTGAAGTGGTG
GCCTAACTACGGCTACACTAGAAGAACAGTATTTGGTATCTGCGCTCTGCTGAAGCCAGTTACCTTCGGA
AAAAGAGTTGGTAGCTCTTGATCCGGCAAACAAACCACCGCTGGTAGCGGTGGTTTTTTTGTTTGCAAGC
AGCAGATTACGCGCAGAAAAAAAGGATCTCAAGAAGATCCTTTGATCTTTTCTACGGGGTCTGACGCTCA
GTGGAACGAAAACTCACGTTAAGGGATTTTGGTCATGAGATTATCAAAAAGGATCTTCACCTAGATCCTT
TTAAATTAAAAATGAAGTTTTAAATCAATCTAAAGTATATATGAGTAAACTTGGTCTGACAGTTACCAATG
CTTAATCAGTGAGGCACCTATCTCAGCGATCTGTCTATTTCGTTCATCCATAGTTGCCTGACTCCCCGTCGT
GTAGATAACTACGATACGGGAGGGCTTACCATCTGGCCCCAGTGCTGCAATGATACCGCGGGACCCACG
CTCACCGGCTCCAGATTTATCAGCAATAAACCAGCCAGCCGGAAGGGCCGAGCGCAGAAGTGGTCCTGC
AACTTTATCCGCCTCCATCCAGTCTATTAATTGTTGCCGGGAAGCTAGAGTAAGTAGTTCGCCAGTTAATA
GTTTGCGCAACGTTGTTGCCATTGCTACAGGCATCGTGGTGTCACGCTCGTCGTTTGGTATGGCTTCATTC
AGCTCCGGTTCCCAACGATCAAGGCGAGTTACATGATCCCCCATGTTGTGCAAAAAAGCGGTTAGCTCCT
TCGGTCCTCCGATCGTTGTCAGAAGTAAGTTGGCCGCAGTGTTATCACTCATGGTTATGGCAGCACTGCA
TAATTCTCTTACTGTCATGCCATCCGTAAGATGCTTTTCTGTGACTGGTGAGTACTCAACCAAGTCATTCTG
AGAATAGTGTATGCGGCGACCGAGTTGCTCTTGCCCGGCGTCAATACGGGATAATACCGCGCCACATAG
CAGAACTTTAAAAGTGCTCATCATTGGAAAACGTTCTTCGGGGCGAAAACTCTCAAGGATCTTACCGCTG
TTGAGATCCAGTTCGATGTAACCCACTCGTGCACCCAACTGATCTTCAGCATCTTTTACTTTCACCAGCGTT
TCTGGGTGAGCAAAAACAGGAAGGCAAAATGCCGCAAAAAAGGGAATAAGGGCGACACGGAAATGTTG
AATACTCATACTCTTCCTTTTTCAATATTATTGAAGCATTTATCAGGGTTATTGTCTCATGAGCGGATACAT
ATTTGAATGTATTTAGAAAAATAAACAAATAGGGGTTCCGCGCACATTTCCCCGAAAAGTGCCACCTGAC
GTCTAAGAAACCATTATTATCATGACATTAACCTATAAAAATAGGCGTATCACGAGGCCCTTTCGTC

[0645] Nucleic acids were designed and produced to encode non-limiting examples of engineered proteins comprising a Vingi-1 driver protein (SEQ ID:327) with one or more-point mutations and/or domain fusions. Mutations were made in the endonuclease domain (residues 40-234), RNA binding domain (residues 235-340), and reverse transcriptase domain (residues 341-982) and polypeptide fusions were made at the N- and C-terminus.

[0646] In some examples, the following HMGN1 polypeptide was incorporated (e.g., as an N-terminal fusion):

(SEQ ID NO: 23)
MPKRKVSSAEGAAKEEPKRRSARLSAKPPAKVEAKPKKAAAKDKSSD
KKVQTKGKRGAKGKQAEVANQETKEDLPAENGETKTEESPASDEAGE
KEAKSD

[0647] In some examples, the following HMGB1 polypeptide was incorporated (e.g. as a C-terminal fusion):

(SEQ ID NO: 24)
GKGDPKKPRGKMSSYAFFVQTCREEHKKKHPDASVNFSEFSKKCSER
WKTMSAKEKGKFEDMAKADKARYEREMKTYIPPKGE

[0648] In some examples, the following UL12 polypeptide was incorporated (e.g., as a C-terminal fusion):

(SEQ ID NO: 25)
ESTVGPACPPGRTVTKRPWALAEDTPRGPDSPPKRPRPNSLPLTTTF
RPLPPPPQTTSAVDPSSHSPVNPPRDQHATDTADEKPRAASPALSDA
SGPPTPDIPLSPGGTHARDPDADPDSPDLDS

[0649] In some examples, the following Sto7d polypeptide was incorporated (e.g., as a C-terminal fusion):

(SEQ ID NO: 26)
VTVKFKYKGEEKEVDISKIKKVWRVGKMISFTYDDNGKTGRGAVSEK
DAPKELLQMLEK

[0650] In some examples, the following Sso7d polypeptide was incorporated (e.g., as a C-terminal fusion):

(SEQ ID NO: 377)
VTVKFKYKGEEKEVDISKIKKVWRVGKMISFTYDDNGKTGRGAVSEK
DAPKELLQMLEK

[0651] In some examples, the following GP45 protein from T4 phage was incorporated (e.g. as a C-terminal fusion):

(SEQ ID NO: 329)
KLSKDTTALLKNFATINSGIMLKSGQFIMTRAVNGTTYAEANISDVI
DFDVAIYDLNGFLGILSLVNDDAEISQSEDGNIKIADARSTIFWPAA
DPSTVVAPNKPIPFPVASAVTEIKAEDLQQLLRVSRGLQIDTIAITV
KEGKIVINGFNKVEDSALTRVKYSLTLGDYDGENTFNFIINMANMKM
QPGNYKLLLWAKGKQGAAKFEGEHANYVVALEADSTHDF

[0652] In some examples, peptides (SEQ ID NOs: 379, 380) derived from HIV Viral Infectivity Factor (VIF) (SEQ ID NO: 378) were incorporated.

[0653] In some examples, the following RecT polypeptide from Pseudomonas aeruginosa (paRecT, SEQ ID NO: 381) were incorporated:

MGTALTPLLTKFATRYEMGTTPEEVANTLKQTCFKGQVNDSQMVALLIVA
DQYKLNPFTKELYAFPDKNNGIVPVVGVDGWARIINENPQFDGMEFSMDQ
QGTECTCKIYRKDRSHAISATEYMAECKRNTQPWQSHPRRMLRHKAMIQC
ARLAFGFAGIYDQDEAERIVERDVTPAEQYEDVSEAICLIKDSPTMEDLQ
AAFSNAWKAYKTKGARDQLTAAKDQRKKELLDAPIDVEFEETGDDRAA

[0654] In some examples, the following i53 peptide was incorporated (SEQ ID NO: 382):

AASLNGAPLIKDPMLIFVKTLTGKTITLEVEPSDTIENVKAKIQDKEGIP
PDQQRLAFAGKSLEDGRTLSDYNILKDSKLHPLLRLR

[0655] In some examples, the following NLS peptide from PARP1 was incorporated (SEQ ID NO: 384): KKKSKK

[0656] In some examples, the following NLS peptide from TOPB1 was incorporated (SEQ ID NO: 383): PSQQKRK

[0657] In some examples, the following PolD3 polypeptide was incorporated (SEQ ID NO: 385):

ADQLYLENIDEFVTDQNKIVTYKWLSYTLGVHVNQAKQMLYDYVERKRKE
NSGAQLHVTYLVSGSLIQNGHSCHKVAVVREDKLEAVKSKLAVTASIHVY
SIQKAMLKDSGPLFNTDYDILKSNLQNCSKFSAIQCAAAVPRAPAESSSS
SKKFEQSHLHMSSETQANNELTTNGHGPPASKQVSQQPKGIMGMFASKAA
AKTQETNKETKTEAKEVTNASAAGNKAPGKGNMMSNFFGKAAMNKFKVNL
DSEQAVKEEKIVEQPTVSVTEPKLATPAGLKKSSKKAEPVKVLQKEKKRG
KRVALSDDETKETENMRKKRRRIKLPESDSSEDEVFPDSPGAYEAESPSP
PPPPSPPLEPVPKTEPEPPSVKSSSGENKRKRKRVLKSKTYLDGEGCIVT
EKVYESESCTDSEEELNMKTSSVHRPPAMTVKKEPREERKGPKKGTAALG
KANRQVSITGFFQRK

[0658] In some examples, the following RAD17 polypedite was incorporated (SEQ ID NO: 386):

LVEPEEVVEMSHMPGDLFNLYLHQNYIDFFMEIDDIVRASEFLSFADILS
GDWNTRSLLREYSTSIATRGVMHSNKARGYAHCQGGGSSFRPLHKPQWFL
INKKYRENCLAAKALFPDFCLPALCLQTQLLPYLALLTIPMRNQAQISFI
QDIGRLPLKRHFGRLKMEALTDREHGMIDPDSGDEAQLNGGHSAEESLGE
PTQATVPETWSLPLSQNSASELPASQPQPFSAQGDMEENIIIEDYESDGT

[0659] In some examples, the following SCML1 polypeptide was incorporated (SEQ ID NO: 387):

WSVEAVVLFLKQTDPLALCPLVDLFRSHEIDGKALLLLTSDVLLKHLGVK
LGTAVKLCYYIDRLKQGK

[0660] In some examples, the following MDC1-derived polypeptide was incorporated (SEQ ID NO: 388):

EDTQAIDWDVEEEEETEQSSESLRCNVEPVGRLHIFSGAHGPEKDFPLHL
GKNVVGRMPDCSVALPFPSISKQHAEIEILAWDKAPILRDCGSLNGTQIL
RPPKVLSPGVSHRLRDQELILFADLLCQYHRLDVSLPFVSRGPLTVEETP
RVQGETQPQRLLLAEDSEEEVDFLSERRMVKKSRTTSSSVIVPESDEEGH
SPVLGGLGPPFAFNLNSDT

[0661] In some examples, the following CDKN2a polypeptide was incorporated (SEQ ID NO: 389):

MVRRFLVTLRIRRACGPPRVRVFVVHIPRLTGEWAAPGAPAAVALVLMLL
RSQRLGQQPLPRRP

[0662] In some examples, the following MDM2 NLS was incorporated (SEQ ID NO: 390):

RQRKRHK

[0663] In some examples, the following PCNA interaction motif from CHAF1A was incorporated (SEQ ID NO: 391):

MLEELECGAPGARGAATAMDCKDRPAFPVKKLIQARLPFKRLNLVPKGK

[0664] In some examples, the following MSH4 polypeptide was incorporated (SEQ ID NO: 392):

MLRPEISSTSPSAPAVSPSSGETRSPQGPRYNFGLQETPQSRPSVQVVSA
STCPGTSGAAGDRSSSSSSLPCPAPNSRPAQGS

[0665] In some examples, the following WPRE 3′UTR was incorporated (SEQ ID NO: 393):

AATCAACCTCTGGATTACAAAATTTGTGAAAGATTGACTGGTATTCTTAA
CTATGTTGCTCCTTTTACGCTATGTGGATACGCTGCTTTAATGCCTTTGT
ATCATGCTATTGCTTCCCGTATGGCTTTCATTTTCTCCTCCTTGTATAAA
TCCTGGTTGCTGTCTCTTTATGAGGAGTTGTGGCCCGTTGTCAGGCAACG
TGGCGTGGTGTGCACTGTGTTTGCTGACGCAACCCCCACTGGTTGGGGCA
TTGCCACCACCTGTCAGCTCCTTTCCGGGACTTTCGCTTTCCCCCTCCCT
ATTGCCACGGCGGAACTCATCGCCGCCTGCCTTGCCCGCTGCTGGACAGG
GGCTCGGCTGTTGGGCACTGACAATTCCGTGGTGTTGTCGGGGAAGCTGA
CGTCCTTTCCATGGCTGCTCGCCTGTGTTGCCACCTGGATTCTGCGCGGG
ACGTCCTTCTGCTACGTCCCTTCGGCCCTCAATCCAGCGGACCTTCCTTC
CCGCGGCCTGCTGCCGGCTCTGCGGCCTCTTCCGCcTCTTCGCCTTCGCC
CTCAGACGAGTCGGATCTCCCTTTGGGCCGCCTCCCCGC

[0666] In some examples, the following FEN1 PCNA interaction motif was incorporated (SEQ ID NO: 394):

STQGRLDDFFKVTGSL

[0667] In some examples, the following P21 PCNA interaction motif was incorporated (SEQ ID NO: 395):

RKRRQTSMTDFYHSKRRLIFSKRKP

[0668] In some examples, the following ANKRD28-derived polypeptide was incorporated (SEQ ID NO: 396):

EKRTPLHAAAYLGDAEIIELLILSGARVNA

[0669] Constructs were evaluated using an experimental transposition assay described in Example 3. Non-limiting examples of the constructs tested include:

[0670] Single mutations or their combinations, made in a retroelement-derived polypeptide derived from a wild-type Vingi-1_Acar retrotransposon (EX2985):
[0671] H929G (SEQ ID: 70), Q634L (SEQ ID: 71), A684S (SEQ ID: 72), F977Y (SEQ ID: 73), H850Q (SEQ ID: 74), F238Y (SEQ ID: 75), A875T (SEQ ID: 76), 145L (SEQ ID: 77), L434I (SEQ ID: 78), I439L (SEQ ID: 79), T470A (SEQ ID: 80), Y673W (SEQ ID: 81), Y950M (SEQ ID: 82), A901H (SEQ ID: 83), G833I (SEQ ID: 84), G833S (SEQ ID: 85), R350K (SEQ ID: 86), S35C (SEQ ID: 87), L111V (SEQ ID: 88), M16I (SEQ ID: 89), A87S (SEQ ID: 90), N311D (SEQ ID: 91), 152S (SEQ ID: 92), Y313F (SEQ ID: 93), 152P (SEQ ID: 94), S109T (SEQ ID: 95), Q215D (SEQ ID: 96), R468K (SEQ ID: 97), C495S (SEQ ID: 98), N529S (SEQ ID: 99), L476R (SEQ ID: 100), I473R (SEQ ID: 101), L493R (SEQ ID: 102), W353R (SEQ ID: 103), M345K (SEQ ID: 104), I475R (SEQ ID: 105), L25Q (SEQ ID: 106), S39K (SEQ ID: 107), I52E (SEQ ID: 108), Q63T (SEQ ID: 109), S89Q (SEQ ID: 110), G116N (SEQ ID: 111), A132T (SEQ ID: 112), V145S (SEQ ID: 113), K196W (SEQ ID: 114), N299K (SEQ ID: 115), Q302K (SEQ ID: 116), A329S (SEQ ID: 117), E933R (SEQ ID: 118), K703R (SEQ ID: 119), K480Q (SEQ ID: 120), K675R (SEQ ID: 121), K789R (SEQ ID: 122), H787R (SEQ ID: 123), 1793R (SEQ ID: 124), P808K (SEQ ID: 125), D792K (SEQ ID: 126), 1793K (SEQ ID: 127), E797R (SEQ ID: 128), D792M (SEQ ID: 129), P808R (SEQ ID: 130), M735R (SEQ ID: 131), A742K (SEQ ID: 132), L693K (SEQ ID: 133), N745K (SEQ ID: 134), Q354K (SEQ ID: 135), R357K (SEQ ID: 136), D362R (SEQ ID: 137), N412E (SEQ ID: 138), K424R (SEQ ID: 139), M435Y (SEQ ID: 140), E447Q (SEQ ID: 141), R486K (SEQ ID: 142), P511S (SEQ ID: 143), P515E (SEQ ID: 144), R568K (SEQ ID: 145), H576K (SEQ ID: 146), S595R (SEQ ID: 147), E676R (SEQ ID: 148), A684E (SEQ ID: 149), A874E (SEQ ID: 150), M570L (SEQ ID: 151), V574L (SEQ ID: 152), L590F (SEQ ID: 153), A621S (SEQ ID: 154), Y950I (SEQ ID: 155), M735E (SEQ ID: 156), G886P (SEQ ID: 157), Q300L (SEQ ID: 158), A519P (SEQ ID: 159), G833V (SEQ ID: 160), K784R (SEQ ID: 161), E514A (SEQ ID: 162), C938D (SEQ ID: 163), P515K (SEQ ID: 164), P780A (SEQ ID: 165), K807A (SEQ ID: 166), K414R (SEQ ID: 167), K966R (SEQ ID: 168), Y562F (SEQ ID: 169), A742M (SEQ ID: 170), H460R (SEQ ID: 171), E418R (SEQ ID: 172), D334E (SEQ ID: 173), D191A (SEQ ID: 174), R609K (SEQ ID: 175), K611T (SEQ ID: 176), N665K (SEQ ID: 177), N695R (SEQ ID: 178), R696H (SEQ ID: 179), A742T (SEQ ID: 180), K705R (SEQ ID: 181), A755K (SEQ ID: 182), A786E (SEQ ID: 183), K807R (SEQ ID: 184), P808T (SEQ ID: 185), C841D (SEQ ID: 186), E842P (SEQ ID: 187), T854Q (SEQ ID: 188), T867R (SEQ ID: 189), Q947E (SEQ ID: 190), A951V (SEQ ID: 191), Q954K (SEQ ID: 192), N330E (SEQ ID: 193), L60P (SEQ ID: 194), G833K (SEQ ID: 195), G861S (SEQ ID: 196), Y950V (SEQ ID: 197), G833L (SEQ ID: 198), A226T (SEQ ID: 199), K604R (SEQ ID: 200), S35A (SEQ ID: 201), C144T (SEQ ID: 202), G316E (SEQ ID: 203), N330K (SEQ ID: 204), D360A (SEQ ID: 205), M167L (SEQ ID: 206), T214S (SEQ ID: 207), Y950L (SEQ ID: 208), V838Q (SEQ ID: 209), D375N (SEQ ID: 210), H783A (SEQ ID: 211), P511K (SEQ ID: 212), P515S (SEQ ID: 213), C779A (SEQ ID: 214), P808W (SEQ ID: 215), S754Y (SEQ ID: 216), 1793N (SEQ ID: 217), P478W (SEQ ID: 218), I491R (SEQ ID: 219), H201N (SEQ ID: 220), A223V (SEQ ID: 221), Q309K (SEQ ID: 222), K333R (SEQ ID: 223), R465K (SEQ ID: 224), R489Q (SEQ ID: 225), H840T (SEQ ID: 226), S858R (SEQ ID: 227), A892H (SEQ ID: 228), E904H (SEQ ID: 229), F715E (SEQ ID: 230), K661R (SEQ ID: 231), K611Q (SEQ ID: 232), D792R (SEQ ID: 233), G426R (SEQ ID: 234), R606K (SEQ ID: 235), H739K (SEQ ID: 236), S771C (SEQ ID: 237), H171N (SEQ ID: 238), H929R (SEQ ID: 239), C127I (SEQ ID: 240), L637N (SEQ ID: 241), R731K (SEQ ID: 242), S754T (SEQ ID: 243), Q790K (SEQ ID: 244), R927K (SEQ ID: 245).
   Peptide/Domain fusions: N-terminal HMGN1 fusion (SEQ ID: 246), C-terminal HMGB1 (SEQ ID: 247), UL12 (SEQ ID: 249), PCNA interaction motif from FEN1 (SEQ ID: 250), PCNA interaction motif from P21 (SEQ ID: 251), Gp45 (SEQ ID: 252), Sso7D (SEQ ID: 253), Vif motifs (SEQ ID: 254), Sto7D (SEQ ID: 255), RAD51 (SEQ ID: 256), Dead Cas9 (SEQ ID: 259), I53 (SEQ ID: 263), MDC1 (SEQ ID: 264), BRCA2-derived peptide (SEQ ID: 265), PolD3 fusion (SEQ ID: 266), i53 (SEQ ID: 267), TOPBP1 NLS (SEQ ID: 268), PARP1 NLS (SEQ ID: 269), ANKRD28 (SEQ ID: 270), RAD17 (SEQ ID: 271), SCML1 (SEQ ID: 272), CDKN2a (SEQ ID: 273), PCNA interaction motif from CHAF1A (SEQ ID: 274), paRecT (SEQ ID: 275), MSH4 (SEQ ID: 276), Mdm2 NLS (SEQ ID: 277).
   Peptide deletions: RNASEH deletion (SEQ ID: 248), endonuclease domain deletion (SEQ ID: 257), Zinc finger domain deletion (SEQ ID: 285),
   Heterologous UTRs may also be added to the mRNA: WPRE3 3′ UTR (SEQ ID: 260), hag 3′ UTR (SEQ ID: 261), human alpha globin 5′ UTR (SEQ ID: 262).

[0672] FIGS. 6A-6I shows integration assays results using Vingi-1 drivers with combinations of domain fusions and point mutations. In these experiment, different retrotransposable element (driver) constructs were used in the trans configuration (driver and GFP reporter encoded by different RNA). A common gene delivery construct encoding the GFP reporter (EX2988; SEQ ID NO: 328) was used for all driver constructs tested. Aside from the mutations and fusions listed, all constructs were identical in sequence to EX2985 (WT, marked with pattern). IVT of different RTE constructs was carried out as described above. U20S cells were used in 24-well plate, at 120K cells/well. 1000 ng RNA was transfected with 1.2 uL Lipofectamine. Integration was assessed based on the percentage of GFP positive cells (% GFP positive cells) after 24 h, with a higher percentage of GFP positive cells being indicative of higher levels of integration. % GFP positive cells was assessed by FACS following 24 hours after transfection with RNA.

[0673] As shown in FIG. 6A, Vingi-1 with the mutation—G833I improved GFP signal by 5% compared to the WT driver. Both Isoleucine and Glycine are hydrophobic residues, but Glycine can interrupt an alpha helix or a beta sheet secondary structure, thus changing the protein conformation. In FIG. 6B, Vingi-1 with the mutation P808K improved the GFP signal by 10% compared to the WT driver. As lysine is a positively charged residue and Proline isn't, this mutation can increase the affinity of the driver towards the RNA template in the RT domain. In FIG. 6C, Vingi-1 with the mutation M735E, improved the GFP signal by 10% compared to the WT driver. Methionine is a large bulky hydrophobic residue that can cause steric interference in the structure of the protein. Also, Glutamate is a negatively charged amino acid that can form hydrogen bonds. Thus, removal of Methionine in position 735, can either stabilize the protein conformation, or forming stabilizing intramolecular H-bonds. In FIG. 6D, two different NLS peptides Vingi-1 fusions, PARP1 and TOBP1, improved the GFP signal up to 5% compared to the WT. In FIG. 6E, the mutation Vingi-1 with the mutation T214S, improved the GFP signal by 8-10% compared to the WT. A substitution of a Threonine amino acid with Serine, which is very similar in properties but is different by size, can alter the protein conformation, leading to a more stable protein structure. In FIG. 6F, the introduction of a positively charged residue to the Vingi-1 driver, N695R, improved the GFP signal in more than 10% compared to the WT, probably due to increased RNA or DNA binding affinity of the reverse transcriptase domain. In FIG. 6G, N-terminal Vingi-1 fusion of paRecT improved the GFP signal by 10% compared to the WT, possibly as a result of induced activation of the recombination pathway by the RecT protein fusion. In FIG. 6H, Vingi-1 with the mutation F977Y, had a higher GFP signal of about 5% compared to the WT. As both Phenylalanine and Tyrosine have aromatic ring, the addition a hydroxyl group on the Tyrosine can form additional intramolecular or intermolecular hydrogen bonds, such as intermolecular H-bonds. In addition, Vingi-1 with the mutation Q215D, improved the activity by almost 2-fold than the WT. Position 215 may serve as the catalytic residue in the endonuclease domain, and by mutation from Glutamine to Aspartate can increase the catalytic efficiency, leading to higher activation. In FIG. 6I, Vingi-1 with the mutation A742M improved the activity by about 12%, Both of Alanine and Methionine are hydrophobic amino acids, but Methionine is bigger and can have a larger hydrophobic core packing effect on the protein, thus, increase the protein stability.

[0674] It was observed that numerous mutations and domains fusions were found to improve Vingi-1 driver activity, while others had negative effects. As shown for ZFL2-2, by combining multiple different modifications targeting different retrotransposable element functions, significant improvements in integration are possible. Overall, with the tested mutations and domains fusions introduced to Vingi-1 driver modifications have shown up to 2-fold improvement in activity compared to WT.

### Example 8

[0675] In order to test the effect of activity-improving modifications on improving integration efficiency of retrotransposable elements in human cells, Vingi-1_Acer mutants were tested for its ability to deliver transgenes to human T-cells. Vingi-1_Acar is a Vingi LINE element taken from the genome of Anolis carolinensis (green anole lizard). The driver and GFP reporter were configured in trans (with separate driver construct and gene delivery construct, respectively), transcribed as mRNA from plasmid DNA as described in previous examples.

### Materials:

Peripheral blood mononuclear cells (PBMCs)—Cell Generation, Cyropreserved (cat #1010025)
Medium components:
[0676] Thawing medium—complete RPMI1640
[0677] Activation and culturing medium—ImmunoCult™-XF T cell Expansion Medium (Cat #10981, StemCell™ Technologies)
[0678] Penicillin—Streptomycin (“penstrep”) Solution 100×—(Cat #L0022)
[0679] Fetal bovine serum (“FBS”) qualified, heat inactivated, Brazil. (Cat #10500064)
[0680] IL2—Human IL-2 IS (improved sequence), premium grade, 1000 ug (Cat #130-097-748, Miltenyi) suspended in deionized water to 1×10⁵ U/ml

### Reagents

[0681] T Cell TransAct™, human (Cat #130-111-160, Miltenyi Biotec)
[0682] ApoE 0.1 mg/ml
[0683] LNPs—prepared in house

### Flow Cytometry

[0684] DAPI—(Cat #) suspended to 1 mg/ml in DW for live/dead discrimination
[0685] Cytoflex Plus—4 Lasers (V, B, Y, R)

### Labware

[0686] T75 flask
[0687] T25 flask
[0688] 96-well flat-bottom microplates, TC treated, clear
[0689] 96-well round-bottom microplates, TC treated, clear
[0690] PCR Strips

### Preparation of Mediums/Reagents:

[0691] Complete RPMI 1640 (“cRPMI”) thawing medium preparation.
   [0692] Prepare by adding 1% penstrep and 10% FBS by adding 5 ml penstrep and 50 ml FBS to 500 ml of RPMI 1640 medium.
[0693] “Complete T cell medium” preparation
   [0694] Re-constitute 1000 μg of lyophilized human IL2 IS premium grade (Miltenyi) to a concentration of 1×10⁵ U/ml (>100 μg/ml) in deionized water under sterile conditions.
   [0695] Divide to aliquots of 100 μl and store at −80 C. Before use thaw and dilute 1:10 by adding 900 μl ImmunoCult™-XF T cell Expansion Medium. Store up to 10 days at 4 C.
   [0696] Prepare 0.5% penstrep ImmunoCult™-XF T cell Expansion Medium by adding 2.5 ml penstrep to 500 ml of medium.
   [0697] Prepare the complete T cell medium by adding 50 μL of ×1000 IL-2 to every 50 mL of 0.5% penstrep ImmunoCult™-XF T cell Expansion Medium (Final IL2 concentration of 0.1p g/ml for Gibco or 100 U/ml for Miltenyi)

### Procedure:

[0698] Day −2 (relative to transfection, 0 days post thaw)—[insert date]
   [0699] PBMCs Thawing
      [0700] Thaw the PBMCs vial in a 37° C. water bath. Thawing should be rapid (approximately 2 minutes).
      [0701] Remove the vial from the water bath as soon as the contents are thawed and decontaminate by dipping in or spraying with 70% ethanol.
      [0702] Gently add 1 ml of 100% FBS to thawed vial of PBMCs
      [0703] Transfer the vial contents to a centrifuge tube containing 10.0 mL RPMI complete medium and spin at 300 g for 10 minutes.
      [0704] Resuspend the cell pellet with 10 ml complete T cells medium.
      [0705] Count the cells using an automatic cell counter and Trypan Blue for live/dead discrimination
      [0706] Bring PBMCs to final concentration of 2×10⁶ viable cells/mL and dispense into a T75 flask
   [0707] T cell activation
      [0708] Activate T cells by adding 100 ul TransAct per 10 ml T cells complete medium.
      [0709] Incubate at 37 C, 5% CO² for 2 days
      [0710] Monitor activation by observing density and clumps under microscope
[0711] Day 0 (relative to transfection, 2 days post thaw)
   [0712] Lipid nanoparticles are produced according to manufacturer's instructions (Ignite Nano Assembler, Precision Nanosystems).

### LNP Treatment:

[0713] Count activated T cells
[0714] Take the appropriate number of cells for the LNP treatment
[0715] Centrifuge cells at 300 g for 5 min at RT
[0716] Aspirate the supernatant and discard.
[0717] Bring cells to 1×10⁶ cells/ml by resuspend cell's pellet with T cells complete medium
[0718] supplemented with 2 ug/ml ApoE (0.1 mg/ml stock).
[0719] Seed 100 μl per well in 96-well plate
[0720] Dropwise pipette the LNP treatments
[0721] Incubate at 37C, 5% CO2 for 1 day

### Transfection:

[0722] Day 1 (relative to transfection, 3 days post thaw)
   [0723] LNP residues removal
      [0724] After 24 h centrifuge 96-well plates at 300 g for 5 min at RT.
      [0725] Carefully discard most of the medium using a multichannel pipette
      [0726] Resuspend cells with 100 μl fresh complete T cells medium—Without ApoE.
[0727] Day 2 (relative to transfection, 4 days post thaw)
   [0728] Split cells
      [0729] Before splitting cells use EVOS to observe GFP expression
      [0730] Split cells 1: by taking μl into μl (total of 200 μl) on new 96-well plate
[0731] Day 5 (relative to transfection, 7 days post thaw)—[insert date]
   [0732] Detection of transgene expression (FACS) and copies (dPCR)—5 day time point
      [0733] For dPCR—transfer 80 μl from each sample into PCR strips.
      [0734] a. Centrifuge at 2100 g for 10 min at 4 C
      [0735] b. Discard supernatant and freeze pellet at −80 C
      [0736] For FACS—transfer 80 μl from each sample into PCR strips.
      [0737] c. Prepare PBS+DAPI×2 solution by diluting 1 mg/ml stock 1:1000 in PBS−/−
      [0738] d. Place 80 μl of DAPI×2 solution into wells of a 96-well round bottom plate
      [0739] e. Transfer 80 μl of cells into the wells containing the 2×DAPI and mix
      [0740] f. Run on CytoFlex flow cytometer using the following settings and with stopping gate on 15000 live cells:

TABLE 13

| Parameter (channel) | gain |
|---|---|
| Threshold FSC-H | 30k |
| FSC | 64 (beads 49) |
| SSC | 57 (beads 23) |
| FITC (GFP) | 70 |
| APC (CD19-CAR) | 800 |
| PB450 (Dapi) | 48 |

[0741] For further culture
[0742] Split cells 1:5 every 2-3 days or 1:10 every 4 days with fresh complete T cell medium
[0743] Day x (relative to transfection, x+2 days post thaw)
[0744] Detection of transgene expression (FACS) and copies (dPCR)—
[0745] Repeat steps detailed on day 5 FACS and dPCR timepoint

### Results:

[0746] FIG. 7A shows results of integration assays using Vingi-1 drivers with point mutations. In this experiment, different retrotransposable element constructs were used in the trans configuration (driver and GFP reporter encoded by different RNA). A common gene delivery construct encoding the GFP reporter (EX2988; SEQ ID NO: 328) was used for all driver constructs tested. The following mutations in Vingi-1 were tested in this experiment: Q634L (SEQ ID NO: 71), F238Y+M16I (SEQ ID NO:376), I45L (SEQ ID NO: 77), G833I (SEQ ID NO: 84), K703R (SEQ ID NO: 119), K480Q (SEQ ID NO: 120), K675R (SEQ ID NO: 121), P808K (SEQ ID NO: 125), M570L (SEQ ID NO: 151), L590F (SEQ ID NO: 153), M735E (SEQ ID NO: 156), K966R (SEQ ID NO: 168), A901H (SEQ ID NO: 83), L493R (SEQ ID NO: 102). The wild-type Vingi-1 driver is shown in grey (SEQ ID NO:327).

[0747] Aside from the mutations listed, all Vingi-1 driver constructs were identical in sequence to SEQ ID NO:327. IVT of different RTE constructs was carried out as described above. Human T-cells were used in 96-well plate, at 10K cells/well. 400 ng mRNA was delivered with LNP. Integration was assessed based on the percentage of GFP positive cells (% GFP positive cells) after 5d, with a higher percentage of GFP positive cells being indicative of higher levels of integration. % GFP positive cells was assessed by FACS following 5d hours after LNP delivery of mRNA.

[0748] These results indicate that the described retrotransposable element system can deliver transgenes to primary human cells in all-mRNA LNP compositions and that point mutations can significantly improve insertion efficiency (>50% with single mutations K966R (SEQ ID NO: 168), A901H (SEQ ID NO: 83), M570L (SEQ ID NO: 151)).

[0749] In order to test the effect of activity-improving modifications on improving integration efficiency of retrotransposable elements in human cells, Vingi-1 mutants were tested for its ability to deliver a chimeric antigen receptor (CAR) transgene to human T-cells. The chimeric antigen receptor comprises anti-CD19 scfv, CD8 hinge, CD8 transmembrane, 4-1BB co-stimulatory domain, and CD3zeta cytoplasmic domain.

[0750] Vingi-1 CAR reporter is encoded by plasmid SEQ ID NO: 398, with mRNA cassette containing Clean Cap-compatible T7 RNA promoter (TriLink Biotechnologies, bold) and A30N10A70 polyA tail (underlined). CAR cassette including EF1-A promoter (italics), CAR ORF (bold italics), and synthetic polyadenylation signal is in anti-sense. In between the T7 promoter and CAR cassette is the 5′UTR from Vingi-1 element (italics underlined), and in between the GFP cassette and polyA tail is the 3′UTR from Vingi-1 element (bold underlined).

(SEQ ID NO: 398)
TCGCGCGTTTCGGTGATGACGGTGAAAACCTCTGACACATGCAGCTCCCGGAGACGGTCACAGC
TTGTCTGTAAGCGGATGCCGGGAGCAGACAAGCCCGTCAGGGCGCGTCAGCGGGTGTTGGCGGG
TGTCGGGGCTGGCTTAACTATGCGGCATCAGAGCAGATTGTACTGAGAGTGCACCATATGCGGT
GTGAAATACCGCACAGATGCGTAAGGAGAAAATACCGCATCAGGCGCCATTCGCCATTCAGGCT
GCGCAACTGTTGGGAAGGGCGATCGGTGCGGGCCTCTTCGCTATTACGCCAGCTGGCGAAAGGG
GGATGTGCTGCAAGGCGATTAAGTTGGGTAACGCCAGGGTTTTCCCAGTCACGACGTTGTAAAA
CGACGGCCAGTGAATTGGAGATCGGTACTTCGCGAGTTTAAACTAATACGACTCACTATAAGGG
GGGGACACGGAAAGAGCCTCCCCGAAGATTGAGTgAATTCAGTCGGGCGTCCCCTGGGCAACGT
TTCTTGTAAGCGGCCGATCTTTCCACCCCAAAAGCATTGGATGaGTCGACGCGGCCTACTCGAC
GGATCGATCCGAACAAACGACCCAACACCCGTGCGTTTTATTCTGTCTTTTTATTGCCGATCCC
CTCAGAAGAACTCGTCAAGAAGGCGATAGAAGGCGATGCGCTGCGAATCGGGAGCGGCGATACC
GTAAAGCACGAGGAAGCGGTCAGCCCATTCGCCGCCAAGCTCTTCAGCAATATCACGGGTAGCC
AACGCTATGTCCTGATAGCGGTCGGCCGCTTTAGCGAGGGGGCAGGGCCTGCATGTGAAGGGCG
TCGTAGGTGTCCTTGGTGGCTGTACTCAGACCCTGGTAAAGGCCATCGTGCCCCTTGCCCCTCC
GGCGCTCGCCTTTCATCCCAATCTCACTGTAGGCCTCCGCCATCTTATCTTTCTGCAGTTCATT
GTACAGGCCTTCCTGAGGGTTCTTCCTTCTCGGCTTTCCCCCCATCTCAGGGTCCCGGCCACGT
CTCTTGTCCAAAACATCGTACTCCTCTCTTCGTCCTAGATTGAGCTCGTTATAGAGCTGGTTCT
GGCCCTGCTTGTACGCGGGGGCGTCTGCGCTCCTGCTGAACTTCACTCTCAGTTCACATCCTCC
TTCTTCTTCTTCTGGAAATCGGCAGCTACAGCCATCTTCCTCTTGAGTAGTTTGTACTGGCCTC
ATAAATGGTTGTTTGAATATATACAGGAGTTTCTTTCTGCCCCGTTTGCAGTAAAGGGTGATAA
CCAGTGACAGGAGAAGGACCCCACAAGTCCCGGCCAAGGGCGCCCAGATGTAGATATCACAGGC
GAAGTCCAGCCCCCTCGTGTGCACTGCGCCCCCCGCCGCTGGCCGGCACGCCTCTGGGCGCAGG
GACAGGGGCTGCGACGCGATGGTGGGCGCCGGTGTTGGTGGTCGCGGCGCTGGCGTCGTGGTTG
AGGAGACGGTGACTGAGGTTCCTTGGCCCCAGTAGTCCATAGCATAGCTACCACCGTAGTAATA
ATGTTTGGCACAGTAGTAAATGGCTGTGTCATCAGTTTGCAGACTGTTCATTTTTAAGAAAACT
TGGCTCTTGGAGTTGTCCTTGATGATGGTCAGTCTGGATTTGAGAGCTGAATTATAGTATGTGG
TTTCACTACCCCATATTACTCCCAGCCACTCCAGACCCTTTCGTGGAGGCTGGCGAATCCAGCT
TACACCATAGTCGGGTAATGAGACGCCTGAGACAGTGCATGTGACGGACAGGCTCTGTGAGGGC
GCCACCAGGCCAGGTCCTGACTCCTGCAGTTTCACCTCAGATCCGCCGCCACCCGACCCACCAC
CGCCCGAGCCACCGCCACCTGTGATCTCCAGCTTGGTCCCCCCTCCGAACGTGTACGGAAGCGT
ATTACCCTGTTGGCAAAAGTAAGTGGCAATATCTTCTTGCTCCAGGTTGCTAATGGTGAGAGAA
TAATCTGTTCCAGACCCACTGCCACTGAACCTTGATGGGACTCCTGAGTGTAATCTTGATGTAT
GGTAGATCAGGAGTTTAACAGTTCCATCTGGTTTCTGCTGATACCAATTTAAATATTTACTAAT
GTCCTGACTTGCCCTGCAACTGATGGTGACTCTGTCTCCCAGAGAGGCAGACAGGGAGGATGTA
GTCTGTGTCATCTGGATGTCCGGCCTGGCGGCGTGGAGCAGCAAGGCCAGCGGCAGGAGCAAGG
CGGTCACTGGTAAGGCCATGGTGGCTCACGACACCTGAAATGGAAGAAAAAAACTTTGAACCAC
TGTCTGAGGCTTGAGAATGAACCAAGATCCAAACTCAAAAAGGGCAAATTCCAAGGAGAATTAC
ATCAAGTGCCAAGCTGGCCTAACTTCAGTCTCCACCCACTCAGTGTGGGGAAACTCCATCGCAT
AAAACCCCTCCCCCCAACCTAAAGACGACGTACTCCAAAAGCTCGAGAACTAATCGAGGTGCCT
GGACGGCGCCCGGTACTCCGTGGAGTCACATGAAGCGACGGCTGAGGACGGAAAGGCCCTTTTC
CTTTGTGTGGGTGACTCACCCGCCCGCTCTCCCGAGCGCCGCGTCCTCCATTTTGAGCTCCCTG
CAGCAGGGCCGGGAAGCGGCCATCTTTCCGCTCACGCAACTGGTGCCGACCGGGCCAGCCTTGC
CGCCCAGGGGGGGGCGATACACGGCGGCGCGAGGCCAGGCACCAGAGCAGGCCGGCCAGCTTGA
GACTACCCCCGTCCGATTCTCGGTGGCCGCGCTCGCAGGCCCCGCCTCGCCGAACATGTGCGCT
GGGACGCACGGGCCCCGTCGCCGCCCGCGGCCCCAAAAACCGAAATACCAGTGTGCAGATCTTG
GCCCGCATTTACAAGACTATCTTGCCAGAAAAAAAGCGTCGCAGCAGGTCATCAAAAATTTTAA
ATGGCTAGAGACTTATCGAAAGCAGCGAGACAGGCGCGAAGGTGCCACCAGATTCGCACGCGGC
GGCCCCAGCGCCCAGGCCAGGCCTCAACTCAAGCACGAGGCGAAGGGGCTCCTTAAGCGCAAGG
CCTCGAACTCTCCCACCCACTTCCAACCCGAAGCTCGGGATCAAGAATCACGTACTGCAGCCAG
GTGGAAGTAATTCAAGGCACGCAAGGGCCATAACCCGTAAAGAGGCCAGGCCCGCGGGAACCAC
ACACGGCACTTACCTGTGTTCTGGCGGCAAACCCGTTGCGAAAAAGAACGTTCACGGCGACTAC
TGCACTTATATACGGTTCTCCCCCACCCTCGGGAAAAAGGCGGAGCCAGTACACGACATCACTT
TCCCAGTTTACCCCGCGCCACCTTCTCTAGGCACCGGTTCAATTGCCGACCCCTCCCCCCAACT
TCTCGGGGACTGTGGGCGATGTGCGCTCTGCCCACTGACGGGCACCGGAGCCgaattcgaagct
tTTGCTTGTGATTTCTTTTCTTTTtTTTTTATTTCCATTATTTGAAATGTATTTGCTGTACCA
ATGCTTTTGACACGAAATAAATAAAgctagcACCGGTAAAAAAAAAAAAAAAAAAAAAAAAAAA
AAAaacgttGACTAAAAAAAAAAAAAAAAAAAAAAAAAAAAAAAAAAAAAAAAAAAAAAAAAAA
AAAAAAAAAAAAAAAAAAAaaaaaaGTCTTCGCGCGCATCATCGGATGCCGGGACCGACGAGTG
CAGAGGCGTGCAAGCGAGCTTGGCGTAATCATGGTCATAGCTGTTTCCTGTGTGAAATTGTTAT
CCGCTCACAATTCCACACAACATACGAGCCGGAAGCATAAAGTGTAAAGCCTGGGGTGCCTAAT
GAGTGAGCTAACTCACATTAATTGCGTTGCGCTCACTGCCCGCTTTCCAGTCGGGAAACCTGTC
GTGCCAGCTGCATTAATGAATCGGCCAACGCGCGGGGAGAGGCGGTTTGCGTATTGGGCGCTCT
TCCGCTTCCTCGCTCACTGACTCGCTGCGCTCGGTCGTTCGGCTGCGGCGAGCGGTATCAGCTC
ACTCAAAGGCGGTAATACGGTTATCCACAGAATCAGGGGATAACGCAGGAAAGAACATGTGAGC
AAAAGGCCAGCAAAAGGCCAGGAACCGTAAAAAGGCCGCGTTGCTGGCGTTTTTCCATAGGCTC
CGCCCCCCTGACGAGCATCACAAAAATCGACGCTCAAGTCAGAGGTGGCGAAACCCGACAGGAC
TATAAAGATACCAGGCGTTTCCCCCTGGAAGCTCCCTCGTGCGCTCTCCTGTTCCGACCCTGCC
GCTTACCGGATACCTGTCCGCCTTTCTCCCTTCGGGAAGCGTGGCGCTTTCTCATAGCTCACGC
TGTAGGTATCTCAGTTCGGTGTAGGTCGTTCGCTCCAAGCTGGGCTGTGTGCACGAACCCCCCG
TTCAGCCCGACCGCTGCGCCTTATCCGGTAACTATCGTCTTGAGTCCAACCCGGTAAGACACGA
CTTATCGCCACTGGCAGCAGCCACTGGTAACAGGATTAGCAGAGCGAGGTATGTAGGCGGTGCT
ACAGAGTTCTTGAAGTGGTGGCCTAACTACGGCTACACTAGAAGAACAGTATTTGGTATCTGCG
CTCTGCTGAAGCCAGTTACCTTCGGAAAAAGAGTTGGTAGCTCTTGATCCGGCAAACAAACCAC
CGCTGGTAGCGGTGGTTTTTTTGTTTGCAAGCAGCAGATTACGCGCAGAAAAAAAGGATCTCAA
GAAGATCCTTTGATCTTTTCTACGGGGTCTGACGCTCAGTGGAACGAAAACTCACGTTAAGGGA
TTTTGGTCATGAGATTATCAAAAAGGATCTTCACCTAGATCCTTTTAAATTAAAAATGAAGTTT
TAAATCAATCTAAAGTATATATGAGTAAACTTGGTCTGACAGTTACCAATGCTTAATCAGTGAG
GCACCTATCTCAGCGATCTGTCTATTTCGTTCATCCATAGTTGCCTGACTCCCCGTCGTGTAGA
TAACTACGATACGGGAGGGCTTACCATCTGGCCCCAGTGCTGCAATGATACCGCGGGACCCACG
CTCACCGGCTCCAGATTTATCAGCAATAAACCAGCCAGCCGGAAGGGCCGAGCGCAGAAGTGGT
CCTGCAACTTTATCCGCCTCCATCCAGTCTATTAATTGTTGCCGGGAAGCTAGAGTAAGTAGTT
CGCCAGTTAATAGTTTGCGCAACGTTGTTGCCATTGCTACAGGCATCGTGGTGTCACGCTCGTC
GTTTGGTATGGCTTCATTCAGCTCCGGTTCCCAACGATCAAGGCGAGTTACATGATCCCCCATG
TTGTGCAAAAAAGCGGTTAGCTCCTTCGGTCCTCCGATCGTTGTCAGAAGTAAGTTGGCCGCAG
TGTTATCACTCATGGTTATGGCAGCACTGCATAATTCTCTTACTGTCATGCCATCCGTAAGATG
CTTTTCTGTGACTGGTGAGTACTCAACCAAGTCATTCTGAGAATAGTGTATGCGGCGACCGAGT
TGCTCTTGCCCGGCGTCAATACGGGATAATACCGCGCCACATAGCAGAACTTTAAAAGTGCTCA
TCATTGGAAAACGTTCTTCGGGGCGAAAACTCTCAAGGATCTTACCGCTGTTGAGATCCAGTTC
GATGTAACCCACTCGTGCACCCAACTGATCTTCAGCATCTTTTACTTTCACCAGCGTTTCTGGG
TGAGCAAAAACAGGAAGGCAAAATGCCGCAAAAAAGGGAATAAGGGCGACACGGAAATGTTGAA
TACTCATACTCTTCCTTTTTCAATATTATTGAAGCATTTATCAGGGTTATTGTCTCATGAGCGG
ATACATATTTGAATGTATTTAGAAAAATAAACAAATAGGGGTTCCGCGCACATTTCCCCGAAAA
GTGCCACCTGACGTCTAAGAAACCATTATTATCATGACATTAACCTATAAAAATAGGCGTATCA
CGAGGCCCTTTCGTC

[0751] The above protocol was modified with the following after Day 2 post activation:
[0752] Day 2 (day of transfection)
   [0753] LNP Treatment
      [0754] Count activated T cells
      [0755] Take the appropriate number of cells for the LNP treatment
      [0756] Centrifuge cells at 300 g for 5 min at RT
      [0757] Aspirate the supernatant and discard.
      [0758] Bring cells to 1×10⁶ cells/ml by resuspend cell's pellet with 3 ml T cells complete
      [0759] medium supplemented with 2 ug/ml ApoE (0.1 mg/ml stock).
      [0760] Seed 100 μl per well in 96-well plate, according to the request
      [0761] Dropwise pipette the LNP treatments (see sample list—transfection table)
      [0762] Incubate at 37 C, 5% CO2 for 1 day
[0763] Day 3 (1 day post transfection)
   [0764] LNP residues removal
      [0765] After 24 h centrifuge 96-well plates at 300 g for 5 min at RT.
      [0766] Carefully discard most of the medium using a multichannel pipette
      [0767] Resuspend cells with 100 μl fresh complete T cells medium—Without ApoE.
      [0768] Transfer the cells into 24w G-Rex (both duplicates) and add up to 7 ml T cell medium with IL-2
[0769] Day 4+ (2+ days post transfection)
   [0770] Every 2-3 days replace medium (if needed) or add fresh IL-2
[0771] Day 5, 9 and 12 post transfection
   [0772] Detection of transgene expression (FACS) and copies (dPCR)
      [0773] Mix each well thoroughly.
      [0774] For dPCR—transfer from each sample into PCR strips (make 2 technical samples).
         [0775] Centrifuge at 2100 g for 10 min at 4 C
         [0776] Discard supernatant and freeze pellet at −80C
      [0777] For FACS—transfer from each sample into U shaped 96 well for staining.
         [0778] Mark the samples wells on the bottom of the plate
         [0779] Centrifuge the plate at 300 g for 5 min at room temperature (RT)
         [0780] Discard supernatant by flipping the plate once
         [0781] Prepare staining mix by diluting 1:50 the antibody into FACS buffer Add 50 ul of the staining mix and cover the plate with aluminum foil
         [0782] Incubate for 15 min at RT
         [0783] Stop staining by adding FACS buffer to each well
         [0784] Centrifuge the plate at 300 g for 5 min at RT
         [0785] Discard supernatant by flipping the plate once
         [0786] Prepare PBS+DAPI×1 solution by diluting 1 mg/ml stock 1:2000 in PBS−/−
         [0787] Place 150-200 μl of DAPI×1 solution into the appropriate wells
         [0788] Run on CytoFlex flow cytometer using the following settings and with stopping gate on 15000 live cells:

TABLE 14

| Parameter (channel) | gain |
|---|---|
| Threshold FSC-H | 30k |
| FSC | 64 (beads 49) |
| SSC | 57 (beads 23) |
| FITC (GFP) | 70 |
| APC (CD19-CAR) | 800 |
| PB450 (Dapi) | 48 |

[0789] Export from each sample the following data:
[0790] a. % CAR positive cells
[0791] b. MFI (median and geometric) of CAR (APC-A)
[0792] c. events of singlets
[0793] d. events of CAR positive cells
[0794] Receptor quantification (MESF quick Qal)—
[0795] Prepare 2 tubes with 400 ul of FACS buffer each
[0796] Mark Blank or Beads and add one drop of each bottle to the designated tube (blank to Blank, and number 1-4 to Beads)
[0797] Mix thoroughly and transfer 250 ul to a 96 well plate
[0798] Run by FACS and read 5000 events of each population at the same acquisition settings as the experiment (except for FSC SSC—see Gain).
[0799] Analyze and calculate receptor/cell

### Results:

[0800] FIG. 7B shows results of integration assays using Vingi-1 drivers with point mutations. In this experiment, different retrotransposable element constructs were used in the trans configuration (driver and CAR reporter encoded by different RNA). The same CAR reporter was used for all constructs (SEQ ID NO: 398). The following mutations in Vingi-1 were tested in this experiment: A684S (SEQ ID NO: 72), R696H (SEQ ID NO: 179).

[0801] Aside from the mutations listed, all Vingi-1 driver constructs were identical in sequence to SEQ ID NO:327. IVT of different RTE constructs was carried out as described above. Human T-cells were used in 96-well plate, at 10K cells/well. 400 ng mRNA was delivered with LNP. Integration was assessed based on the percentage of CD19-CAR positive cells after 9-12d, with a higher percentage of CAR positive cells being indicative of higher levels of integration. Receptors/cell was assessed by FACS following 9-12d hours after LNP delivery of mRNA.

A sequence description table with a brief description of the sequences disclosed herein is provided below:

TABLE 15

| SEQ ID NO: | EX# | Protein/DNA | Category | Description |
|---|---|---|---|---|
| 1 | EX154 | PROTEIN | ZFL2-2 | ZFL2-2 driver having N-terminal CtIP fragment |
| | | | | ZFL2-2 fusion |
| 2 | EX155 | PROTEIN | ZFL2-2 | ZFL2-2 driver having N-terminal RAD51 |
| | | | | ZFL2-2 fusion |
| 3 | EX156 | PROTEIN | ZFL2-2 | ZFL2-2 driver having N-terminal UL12 ZFL2-2 |
| | | | | fusion |
| 4 | EX157 | PROTEIN | ZFL2-2 | ZFL2-2 driver having N-terminal BRCA2 |
| | | | | fragment ZFL2-2 fusion |
| 5 | EX158 | PROTEIN | ZFL2-2 | ZFL2-2 driver having N-terminal DSS1 peptide |
| | | | | ZFL2-2 fusion |
| 6 | EX170 | PROTEIN | ZFL2-2 | ZFL2-2 driver having N-terminal HMGN1 |
| | | | | ZFL2-2 fusion |
| 7 | EX171 | PROTEIN | ZFL2-2 | ZFL2-2 driver having C-terminal HMGB1 |
| | | | | ZFL2-2 fusion |
| 8 | EX153 | PROTEIN | ZFL2-2 | ZFL2-2 driver having C-terminal Sto7D ZFL2- |
| | | | | 2 fusion |
| 9 | EX282 | PROTEIN | ZFL2-2 | ZFL2-2 driver having C-terminal Nibrin |
| | | | | MRE11 recruitment peptide ZFL2-2 fusion |
| 10 | EX300 | PROTEIN | ZFL2-2 | ZFL2-2 driver having C-terminal MDM2 |
| | | | | ZFL2-2 fusion |
| 11 | EX301 | PROTEIN | ZFL2-2 | ZFL2-2 driver having C-terminal p53 inhibiting |
| | | | | peptide to ZFL2-2 fusion |
| 12 | EX302 | PROTEIN | ZFL2-2 | ZFL2-2 driver having C-terminal Nanog |
| | | | | derived peptide ZFL2-2 fusion |
| 13 | EX298 | PROTEIN | ZFL2-2 | ZFL2-2 driver having C-terminal E. coli |
| | | | | RNAseH1 ZFL2-2 fusion |
| 14 | EX169 | PROTEIN | ZFL2-2 | ZFL2-2 driver having C-terminal RNAseH1 |
| | | | | ZFL2-2 fusion |
| 15 | EX272 | PROTEIN | ZFL2-2 | ZFL2-2 driver having N-terminal AAVS1 Zinc |
| | | | | finger ZFL2-2 fusion |
| 16 | EX274 | PROTEIN | ZFL2-2 | ZFL2-2 driver having N-terminal dead Cas9 |
| | | | | (D10A, H840A) ZFL2-2 fusion |
| 17 | EX277 | PROTEIN | ZFL2-2 | ZFL2-2 driver having N-terminal PCSK9 |
| | | | | homing endonuclease ZFL2-2 (endonuclease |
| | | | | mutant D237A) fusion |
| 18 | EX278 | PROTEIN | ZFL2-2 | ZFL2-2 driver having N-terminal PCSK9 |
| | | | | homing endonuclease ZFL2-2 (endonuclease |
| | | | | deleted) fusion |
| 19 | EX294 | PROTEIN | ZFL2-2 | ZFL2-2 driver having N-terminal PCSK9 |
| | | | | homing nickase Q47E ZFL2-2 (endonuclease |
| | | | | deleted) fusion |
| 20 | EX295 | PROTEIN | ZFL2-2 | ZFL2-2 driver having N-terminal PCSK9 |
| | | | | homing nickase Q47E ZFL2-2 (endonuclease |
| | | | | domain mutant D237A) fusion |
| 21 | EX283 | PROTEIN | ZFL2-2 | ZFL2-2 driver having N-terminal nickase Cas9 |
| | | | | (H840A) ZFL2-2 (endonuclease domain |
| | | | | deleted) fusion |
| 22 | EX312 | PROTEIN | ZFL2-2 | ZFL2-2 driver having SpCas9 fusion to ZFL2-2 |
| | | | | Reverse Transcriptase domain |
| 23 | | PROTEIN | Heterologous | human HMGN1 protein |
| 24 | | PROTEIN | Heterologous | human HMGB1 protein |
| 25 | | PROTEIN | Heterologous | UL12 protein |
| 26 | | PROTEIN | Heterologous | Sulfolobus tokodaii Sto7D protein |
| 27 | EX282 | PROTEIN | ZFL2-2 | ZFL2-2 driver having C-terminal NBN peptide |
| | | | | ZFL2-2 fusion |
| 28 | EX282 | DNA | ZFL2-2 | Plasmid encoding ZFL2-2 driver having C- |
| | | | | terminal NBN peptide ZFL2-2 fusion |
| 29 | EX284 | PROTEIN | ZFL2-2 | ZFL2-2 driver having N-terminal MDM2 |
| | | | | peptide ZFL2-2 fusion |
| 30 | EX284 | DNA | ZFL2-2 | Plasmid encoding ZFL2-2 driver having N- |
| | | | | terminal MDM2 peptide ZFL2-2 fusion |
| 31 | EX584 | PROTEIN | ZFL2-2 | ZFL2-2 driver having C-terminal UL12 ZFL2-2 |
| | | | | fusion |
| 32 | EX584 | DNA | ZFL2-2 | Plasmid encoding ZFL2-2 driver having C- |
| | | | | terminal UL12 ZFL2-2 fusion |
| 33 | EX586 | PROTEIN | ZFL2-2 | ZFL2-2 driver having C-terminal UL12 fused |
| | | | | to ZFL2-2, N647K mutation |
| 34 | EX586 | DNA | ZFL2-2 | Plasmid encoding ZFL2-2 driver having C- |
| | | | | terminal UL12 fused to ZFL2-2, N647K |
| | | | | mutation |
| 35 | EX587 | PROTEIN | ZFL2-2 | ZFL2-2 driver having C-terminal Sto7D and |
| | | | | UL12 ZFL2-2 fusion |
| 36 | EX587 | DNA | ZFL2-2 | Plasmid encoding ZFL2-2 driver having C- |
| | | | | terminal Sto7D and UL12 ZFL2-2 fusion |
| 37 | EX594 | PROTEIN | ZFL2-2 | ZFL2-2 driver having C-terminal BRCA2 |
| | | | | peptide ZFL2-2 fusion |
| 38 | EX594 | DNA | ZFL2-2 | Plasmid encoding ZFL2-2 driver having C- |
| | | | | terminal BRCA2 peptide ZFL2-2 fusion |
| 39 | EX595 | PROTEIN | ZFL2-2 | ZFL2-2 driver having N-terminal HMGN1, C- |
| | | | | terminal HMGB1 ZFL2-2 fusion |
| 40 | EX595 | DNA | ZFL2-2 | Plasmid encoding ZFL2-2 driver having N- |
| | | | | terminal HMGN1, C-terminal HMGB1 ZFL2-2 |
| | | | | fusion |
| 41 | EX596 | PROTEIN | ZFL2-2 | ZFL2-2 driver having C-terminal HMGN1 |
| | | | | UL12 ZFL2-2 fusion |
| 42 | EX596 | DNA | ZFL2-2 | Plasmid encoding ZFL2-2 driver having C- |
| | | | | terminal HMGN1 UL12 ZFL2-2 fusion |
| 43 | EX597 | PROTEIN | ZFL2-2 | ZFL2-2 driver having C-terminal UL12 Sto7D |
| | | | | ZFL2-2 fusion |
| 44 | EX597 | DNA | ZFL2-2 | Plasmid encoding ZFL2-2 driver having C- |
| | | | | terminal UL12 Sto7D ZFL2-2 fusion |
| 45 | EX588 | PROTEIN | ZFL2-2 | ZFL2-2 driver having ZFL2-2 fusion encoded |
| | | | | by SEQ ID NO: 46 |
| 46 | EX588 | DNA | ZFL2-2 | Plasmid encoding ZFL2-2 mRNA with Human |
| | | | | beta globin 5′ UTR |
| 47 | EX666 | PROTEIN | ZFL2-2 | ZFL2-2 driver having N-terminal Nhp6a ZFL2- |
| | | | | 2 fusion |
| 48 | EX666 | DNA | ZFL2-2 | Plasmid encoding ZFL2-2 driver having N- |
| | | | | terminal Nhp6a ZFL2-2 fusion |
| 49 | SM001 | PROTEIN | ZFL2-2 | ZFL2-2 protein (as encoded in SM001 plasmid) |
| 50 | SM001 | DNA | ZFL2-2 | L2-2 cis driver and GFP reporter encoding |
| | | | | plasmid |
| 51 | SM002 | PROTEIN | ZFL2-2 | Danio rerio (Zebrafish) ZFL2-2 protein |
| 52 | SM002 | DNA | ZFL2-2 | ZFL2-2 protein encoding plasmid |
| 53 | SM003 | DNA | ZFL2-2 | ZFL2-2 GFP transgene reporter gene delivery |
| | | | | construct |
| 54 | | PROTEIN | Heterologous | SV40 NLS |
| 55 | | PROTEIN | Heterologous | Nucleoplasmin NLS |
| 56 | | PROTEIN | Heterologous | Bipartite SV40 NLS |
| 57 | | PROTEIN | Heterologous | PNRC Nucleolar localization signal |
| 58 | | PROTEIN | Heterologous | PolyR sequence |
| 59 | | PROTEIN | Heterologous | H2B NLS |
| 60 | | DNA | ZFL2-2 | ZFL2-2 3′ UTR |
| 61 | | DNA | ZFL2-1 | ZFL2-1 3′UTR |
| 62 | | DNA | UnaL | UnaL 3′UTR |
| 63 | | DNA | Vingi-1 | Vingi-1 3′UTR |
| 64 | | DNA | ZFL2-2 | ZFL2-2 5′ UTR |
| 65 | | DNA | ZFL2-1 | ZFL2-1 5′UTR |
| 66 | | DNA | UnaL | UnaL 5′UTR |
| 67 | | DNA | Vingi-1 | Vingi-1 5′UTR |
| 68 | | DNA | Heterologous | human beta globin 3′UTR |
| 69 | | DNA | Heterologous | human alpha globin 3′UTR |
| 70 | EX3310 | PROTEIN | Vingi-1 | Vingi-1 driver H929G mutant |
| 71 | EX3311 | PROTEIN | Vingi-1 | Vingi-1 driver Q634L mutant |
| 72 | EX3320 | PROTEIN | Vingi-1 | Vingi-1 driver A684S mutant |
| 73 | EX3314 | PROTEIN | Vingi-1 | Vingi-1 driver F977Y mutant |
| 74 | EX3315 | PROTEIN | Vingi-1 | Vingi-1 driver H850Q mutant |
| 75 | EX3308 | PROTEIN | Vingi-1 | Vingi-1 driver F238Y mutant |
| 76 | EX3309 | PROTEIN | Vingi-1 | Vingi-1 driver A875T mutant |
| 77 | EX3342 | PROTEIN | Vingi-1 | Vingi-1 driver I45L mutant |
| 78 | EX3347 | PROTEIN | Vingi-1 | Vingi-1 driver L434I mutant |
| 79 | EX3348 | PROTEIN | Vingi-1 | Vingi-1 driver I439L mutant |
| 80 | EX3350 | PROTEIN | Vingi-1 | Vingi-1 driver T470A mutant |
| 81 | EX3358 | PROTEIN | Vingi-1 | Vingi-1 driver Y673W mutant |
| 82 | EX3364 | PROTEIN | Vingi-1 | Vingi-1 driver Y950M mutant |
| 83 | EX3366 | PROTEIN | Vingi-1 | Vingi-1 driver A901H mutant |
| 84 | EX3370 | PROTEIN | Vingi-1 | Vingi-1 driver G833I mutant |
| 85 | EX3371 | PROTEIN | Vingi-1 | Vingi-1 driver G833S mutant |
| 86 | EX3463 | PROTEIN | Vingi-1 | Vingi-1 driver R350K mutant |
| 87 | EX3312 | PROTEIN | Vingi-1 | Vingi-1 driver S35C mutant |
| 88 | EX3313 | PROTEIN | Vingi-1 | Vingi-1 driver L111V mutant |
| 89 | EX3316 | PROTEIN | Vingi-1 | Vingi-1 driver M16I mutant |
| 90 | EX3317 | PROTEIN | Vingi-1 | Vingi-1 driver A87S mutant |
| 91 | EX3318 | PROTEIN | Vingi-1 | Vingi-1 driver N311D mutant |
| 92 | EX3319 | PROTEIN | Vingi-1 | Vingi-1 driver I52S mutant |
| 93 | EX3321 | PROTEIN | Vingi-1 | Vingi-1 driver Y313F mutant |
| 94 | EX3322 | PROTEIN | Vingi-1 | Vingi-1 driver I52P mutant |
| 95 | EX3323 | PROTEIN | Vingi-1 | Vingi-1 driver S109T mutant |
| 96 | EX3346 | PROTEIN | Vingi-1 | Vingi-1 driver Q215D mutant |
| 97 | EX3349 | PROTEIN | Vingi-1 | Vingi-1 driver R468K mutant |
| 98 | EX3351 | PROTEIN | Vingi-1 | Vingi-1 driver C495S mutant |
| 99 | EX3352 | PROTEIN | Vingi-1 | Vingi-1 driver N529S mutant |
| 100 | EX3431 | PROTEIN | Vingi-1 | Vingi-1 driver L476R mutant |
| 101 | EX3432 | PROTEIN | Vingi-1 | Vingi-1 driver I473R mutant |
| 102 | EX3433 | PROTEIN | Vingi-1 | Vingi-1 driver L493R mutant |
| 103 | EX3434 | PROTEIN | Vingi-1 | Vingi-1 driver W353R mutant |
| 104 | EX3435 | PROTEIN | Vingi-1 | Vingi-1 driver M345K mutant |
| 105 | EX3438 | PROTEIN | Vingi-1 | Vingi-1 driver I475R mutant |
| 106 | EX3439 | PROTEIN | Vingi-1 | Vingi-1 driver L25Q mutant |
| 107 | EX3441 | PROTEIN | Vingi-1 | Vingi-1 driver S39K mutant |
| 108 | EX3442 | PROTEIN | Vingi-1 | Vingi-1 driver I52E mutant |
| 109 | EX3443 | PROTEIN | Vingi-1 | Vingi-1 driver Q63T mutant |
| 110 | EX3444 | PROTEIN | Vingi-1 | Vingi-1 driver S89Q mutant |
| 111 | EX3445 | PROTEIN | Vingi-1 | Vingi-1 driver G116N mutant |
| 112 | EX3447 | PROTEIN | Vingi-1 | Vingi-1 driver A132T mutant |
| 113 | EX3449 | PROTEIN | Vingi-1 | Vingi-1 driver V145S mutant |
| 114 | EX3452 | PROTEIN | Vingi-1 | Vingi-1 driver K196W mutant |
| 115 | EX3455 | PROTEIN | Vingi-1 | Vingi-1 driver N299K mutant |
| 116 | EX3456 | PROTEIN | Vingi-1 | Vingi-1 driver Q302K mutant |
| 117 | EX3459 | PROTEIN | Vingi-1 | Vingi-1 driver A329S mutant |
| 118 | EX3391 | PROTEIN | Vingi-1 | Vingi-1 driver E933R mutant |
| 119 | EX3392 | PROTEIN | Vingi-1 | Vingi-1 driver K703R mutant |
| 120 | EX3393 | PROTEIN | Vingi-1 | Vingi-1 driver K480Q mutant |
| 121 | EX3394 | PROTEIN | Vingi-1 | Vingi-1 driver K675R mutant |
| 122 | EX3395 | PROTEIN | Vingi-1 | Vingi-1 driver K789R mutant |
| 123 | EX3398 | PROTEIN | Vingi-1 | Vingi-1 driver H787R mutant |
| 124 | EX3399 | PROTEIN | Vingi-1 | Vingi-1 driver I793R mutant |
| 125 | EX3401 | PROTEIN | Vingi-1 | Vingi-1 driver P808K mutant |
| 126 | EX3402 | PROTEIN | Vingi-1 | Vingi-1 driver D792K mutant |
| 127 | EX3403 | PROTEIN | Vingi-1 | Vingi-1 driver I793K mutant |
| 128 | EX3404 | PROTEIN | Vingi-1 | Vingi-1 driver E797R mutant |
| 129 | EX3406 | PROTEIN | Vingi-1 | Vingi-1 driver D792M mutant |
| 130 | EX3410 | PROTEIN | Vingi-1 | Vingi-1 driver P808R mutant |
| 131 | EX3411 | PROTEIN | Vingi-1 | Vingi-1 driver M735R mutant |
| 132 | EX3412 | PROTEIN | Vingi-1 | Vingi-1 driver A742K mutant |
| 133 | EX3413 | PROTEIN | Vingi-1 | Vingi-1 driver L693K mutant |
| 134 | EX3414 | PROTEIN | Vingi-1 | Vingi-1 driver N745K mutant |
| 135 | EX3464 | PROTEIN | Vingi-1 | Vingi-1 driver Q354K mutant |
| 136 | EX3465 | PROTEIN | Vingi-1 | Vingi-1 driver R357K mutant |
| 137 | EX3467 | PROTEIN | Vingi-1 | Vingi-1 driver D362R mutant |
| 138 | EX3468 | PROTEIN | Vingi-1 | Vingi-1 driver N412E mutant |
| 139 | EX3469 | PROTEIN | Vingi-1 | Vingi-1 driver K424R mutant |
| 140 | EX3470 | PROTEIN | Vingi-1 | Vingi-1 driver M435Y mutant |
| 141 | EX3471 | PROTEIN | Vingi-1 | Vingi-1 driver E447Q mutant |
| 142 | EX3473 | PROTEIN | Vingi-1 | Vingi-1 driver R486K mutant |
| 143 | EX3475 | PROTEIN | Vingi-1 | Vingi-1 driver P511S mutant |
| 144 | EX3476 | PROTEIN | Vingi-1 | Vingi-1 driver P515E mutant |
| 145 | EX3477 | PROTEIN | Vingi-1 | Vingi-1 driver R568K mutant |
| 146 | EX3478 | PROTEIN | Vingi-1 | Vingi-1 driver H576K mutant |
| 147 | EX3479 | PROTEIN | Vingi-1 | Vingi-1 driver S595R mutant |
| 148 | EX3485 | PROTEIN | Vingi-1 | Vingi-1 driver E676R mutant |
| 149 | EX3486 | PROTEIN | Vingi-1 | Vingi-1 driver A684E mutant |
| 150 | EX3507 | PROTEIN | Vingi-1 | Vingi-1 driver A874E mutant |
| 151 | EX3354 | PROTEIN | Vingi-1 | Vingi-1 driver M570L mutant |
| 152 | EX3355 | PROTEIN | Vingi-1 | Vingi-1 driver V574L mutant |
| 153 | EX3356 | PROTEIN | Vingi-1 | Vingi-1 driver L590F mutant |
| 154 | EX3357 | PROTEIN | Vingi-1 | Vingi-1 driver A621S mutant |
| 155 | EX3360 | PROTEIN | Vingi-1 | Vingi-1 driver Y950I mutant |
| 156 | EX3362 | PROTEIN | Vingi-1 | Vingi-1 driver M735E mutant |
| 157 | EX3363 | PROTEIN | Vingi-1 | Vingi-1 driver G886P mutant |
| 158 | EX3369 | PROTEIN | Vingi-1 | Vingi-1 driver Q300L mutant |
| 159 | EX3373 | PROTEIN | Vingi-1 | Vingi-1 driver A519P mutant |
| 160 | EX3374 | PROTEIN | Vingi-1 | Vingi-1 driver G833V mutant |
| 161 | EX3375 | PROTEIN | Vingi-1 | Vingi-1 driver K784R mutant |
| 162 | EX3378 | PROTEIN | Vingi-1 | Vingi-1 driver E514A mutant |
| 163 | EX3379 | PROTEIN | Vingi-1 | Vingi-1 driver C938D mutant |
| 164 | EX3381 | PROTEIN | Vingi-1 | Vingi-1 driver P515K mutant |
| 165 | EX3384 | PROTEIN | Vingi-1 | Vingi-1 driver P780A mutant |
| 166 | EX3385 | PROTEIN | Vingi-1 | Vingi-1 driver K807A mutant |
| 167 | EX3387 | PROTEIN | Vingi-1 | Vingi-1 driver K414R mutant |
| 168 | EX3388 | PROTEIN | Vingi-1 | Vingi-1 driver K966R mutant |
| 169 | EX3353 | PROTEIN | Vingi-1 | Vingi-1 driver Y562F mutant |
| 170 | EX3400 | PROTEIN | Vingi-1 | Vingi-1 driver A742M mutant |
| 171 | EX3389 | PROTEIN | Vingi-1 | Vingi-1 driver H460R mutant |
| 172 | EX3430 | PROTEIN | Vingi-1 | Vingi-1 driver E418R mutant |
| 173 | EX3462 | PROTEIN | Vingi-1 | Vingi-1 driver D334E mutant |
| 174 | EX3219 | PROTEIN | Vingi-1 | Vingi-1 driver D191A mutant |
| 175 | EX3481 | PROTEIN | Vingi-1 | Vingi-1 driver R609K mutant |
| 176 | EX3482 | PROTEIN | Vingi-1 | Vingi-1 driver K611T mutant |
| 177 | EX3484 | PROTEIN | Vingi-1 | Vingi-1 driver N665K mutant |
| 178 | EX3487 | PROTEIN | Vingi-1 | Vingi-1 driver N695R mutant |
| 179 | EX3488 | PROTEIN | Vingi-1 | Vingi-1 driver R696H mutant |
| 180 | EX3491 | PROTEIN | Vingi-1 | Vingi-1 driver A742T mutant |
| 181 | EX3492 | PROTEIN | Vingi-1 | Vingi-1 driver K705R mutant |
| 182 | EX3494 | PROTEIN | Vingi-1 | Vingi-1 driver A755K mutant |
| 183 | EX3497 | PROTEIN | Vingi-1 | Vingi-1 driver A786E mutant |
| 184 | EX3499 | PROTEIN | Vingi-1 | Vingi-1 driver K807R mutant |
| 185 | EX3500 | PROTEIN | Vingi-1 | Vingi-1 driver P808T mutant |
| 186 | EX3502 | PROTEIN | Vingi-1 | Vingi-1 driver C841D mutant |
| 187 | EX3503 | PROTEIN | Vingi-1 | Vingi-1 driver E842P mutant |
| 188 | EX3504 | PROTEIN | Vingi-1 | Vingi-1 driver T854Q mutant |
| 189 | EX3506 | PROTEIN | Vingi-1 | Vingi-1 driver T867R mutant |
| 190 | EX3512 | PROTEIN | Vingi-1 | Vingi-1 driver Q947E mutant |
| 191 | EX3513 | PROTEIN | Vingi-1 | Vingi-1 driver A951V mutant |
| 192 | EX3514 | PROTEIN | Vingi-1 | Vingi-1 driver Q954K mutant |
| 193 | EX3324 | PROTEIN | Vingi-1 | Vingi-1 driver N330E mutant |
| 194 | EX3325 | PROTEIN | Vingi-1 | Vingi-1 driver L60P mutant |
| 195 | EX3326 | PROTEIN | Vingi-1 | Vingi-1 driver G833K mutant |
| 196 | EX3327 | PROTEIN | Vingi-1 | Vingi-1 driver G861S mutant |
| 197 | EX3361 | PROTEIN | Vingi-1 | Vingi-1 driver Y950V mutant |
| 198 | EX3376 | PROTEIN | Vingi-1 | Vingi-1 driver G833L mutant |
| 199 | EX3380 | PROTEIN | Vingi-1 | Vingi-1 driver A226T mutant |
| 200 | EX3396 | PROTEIN | Vingi-1 | Vingi-1 driver K604R mutant |
| 201 | EX3440 | PROTEIN | Vingi-1 | Vingi-1 driver S35A mutant |
| 202 | EX3448 | PROTEIN | Vingi-1 | Vingi-1 driver C144T mutant |
| 203 | EX3458 | PROTEIN | Vingi-1 | Vingi-1 driver G316E mutant |
| 204 | EX3460 | PROTEIN | Vingi-1 | Vingi-1 driver N330K mutant |
| 205 | EX3466 | PROTEIN | Vingi-1 | Vingi-1 driver D360A mutant |
| 206 | EX3343 | PROTEIN | Vingi-1 | Vingi-1 driver M167L mutant |
| 207 | EX3345 | PROTEIN | Vingi-1 | Vingi-1 driver T214S mutant |
| 208 | EX3359 | PROTEIN | Vingi-1 | Vingi-1 driver Y950L mutant |
| 209 | EX3367 | PROTEIN | Vingi-1 | Vingi-1 driver V838Q mutant |
| 210 | EX3368 | PROTEIN | Vingi-1 | Vingi-1 driver D375N mutant |
| 211 | EX3372 | PROTEIN | Vingi-1 | Vingi-1 driver H783A mutant |
| 212 | EX3377 | PROTEIN | Vingi-1 | Vingi-1 driver P511K mutant |
| 213 | EX3382 | PROTEIN | Vingi-1 | Vingi-1 driver P515S mutant |
| 214 | EX3383 | PROTEIN | Vingi-1 | Vingi-1 driver C779A mutant |
| 215 | EX3386 | PROTEIN | Vingi-1 | Vingi-1 driver P808W mutant |
| 216 | EX3407 | PROTEIN | Vingi-1 | Vingi-1 driver S754Y mutant |
| 217 | EX3408 | PROTEIN | Vingi-1 | Vingi-1 driver I793N mutant |
| 218 | EX3428 | PROTEIN | Vingi-1 | Vingi-1 driver P478W mutant |
| 219 | EX3437 | PROTEIN | Vingi-1 | Vingi-1 driver I491R mutant |
| 220 | EX3453 | PROTEIN | Vingi-1 | Vingi-1 driver H201N mutant |
| 221 | EX3454 | PROTEIN | Vingi-1 | Vingi-1 driver A223V mutant |
| 222 | EX3457 | PROTEIN | Vingi-1 | Vingi-1 driver Q309K mutant |
| 223 | EX3461 | PROTEIN | Vingi-1 | Vingi-1 driver K333R mutant |
| 224 | EX3472 | PROTEIN | Vingi-1 | Vingi-1 driver R465K mutant |
| 225 | EX3474 | PROTEIN | Vingi-1 | Vingi-1 driver R489Q mutant |
| 226 | EX3501 | PROTEIN | Vingi-1 | Vingi-1 driver H840T mutant |
| 227 | EX3505 | PROTEIN | Vingi-1 | Vingi-1 driver S858R mutant |
| 228 | EX3508 | PROTEIN | Vingi-1 | Vingi-1 driver A892H mutant |
| 229 | EX3509 | PROTEIN | Vingi-1 | Vingi-1 driver E904H mutant |
| 230 | EX3365 | PROTEIN | Vingi-1 | Vingi-1 driver F715E mutant |
| 231 | EX3390 | PROTEIN | Vingi-1 | Vingi-1 driver K661R mutant |
| 232 | EX3397 | PROTEIN | Vingi-1 | Vingi-1 driver K611Q mutant |
| 233 | EX3405 | PROTEIN | Vingi-1 | Vingi-1 driver D792R mutant |
| 234 | EX3436 | PROTEIN | Vingi-1 | Vingi-1 driver G426R mutant |
| 235 | EX3480 | PROTEIN | Vingi-1 | Vingi-1 driver R606K mutant |
| 236 | EX3490 | PROTEIN | Vingi-1 | Vingi-1 driver H739K mutant |
| 237 | EX3496 | PROTEIN | Vingi-1 | Vingi-1 driver S771C mutant |
| 238 | EX3344 | PROTEIN | Vingi-1 | Vingi-1 driver H171N mutant |
| 239 | EX3409 | PROTEIN | Vingi-1 | Vingi-1 driver H929R mutant |
| 240 | EX3446 | PROTEIN | Vingi-1 | Vingi-1 driver C127I mutant |
| 241 | EX3483 | PROTEIN | Vingi-1 | Vingi-1 driver L637N mutant |
| 242 | EX3489 | PROTEIN | Vingi-1 | Vingi-1 driver R731K mutant |
| 243 | EX3493 | PROTEIN | Vingi-1 | Vingi-1 driver S754T mutant |
| 244 | EX3498 | PROTEIN | Vingi-1 | Vingi-1 driver Q790K mutant |
| 245 | EX3511 | PROTEIN | Vingi-1 | Vingi-1 driver R927K mutant |
| 246 | EX3224 | PROTEIN | Vingi-1 | Vingi-1 driver HMGN1 mutant |
| 247 | EX3565 | DNA | Vingi-1 | Plasmid encoding Vingi-1 driver mRNA with |
| | | | | human alpha globin 5′ and 3′ UTR, N-terminal |
| | | | | HMGN1, C-terminal UL12, and C-termina |
| | | | | HMGB1 fusion |
| 248 | EX3220 | PROTEIN | Vingi-1 | Vingi-1 driver RNASEH deletion mutant |
| 249 | EX3565 | PROTEIN | Vingi-1 | Plasmid encoding Vingi-1 driver mRNA with |
| | | | | human alpha globin 5′ and 3′ UTR, N-terminal |
| | | | | HMGN1, C-terminal UL12, and C-termina |
| | | | | HMGB1 fusion |
| 250 | EX3242 | PROTEIN | Vingi-1 | C-terminal fusion of FEN1 PCNA interaction |
| | | | | motif to Vingi-1 driver |
| 251 | EX3424 | PROTEIN | Vingi-1 | Vingi-1 driver with natural PCNA interaction |
| | | | | motif replaced by PCNA interaction motif from |
| | | | | P21 |
| 252 | EX3425 | PROTEIN | Vingi-1 | C-terminal fusion of T4 phage GP45 to Vingi-1 |
| | | | | protein |
| 253 | EX3426 | PROTEIN | Vingi-1 | C-terminal fusion of Sso7D to Vingi-1 protein |
| 254 | EX3427 | PROTEIN | Vingi-1 | Vingi-1 driver with C-terminal fusion of Vif |
| | | | | derived peptides |
| 255 | EX3421 | PROTEIN | Vingi-1 | C-terminal fusion of Sto7D to Vingi-1 protein |
| 256 | EX3423 | PROTEIN | Vingi-1 | C-terminal fusion of Rad51 to Vingi-1 protein |
| 257 | EX3563 | PROTEIN | Vingi-1 | Vingi-1 driver endonuclease deletion mutant |
| 258 | EX3564 | PROTEIN | Vingi-1 | Vingi-1 driver Zinc fingerdeletion mutant |
| 259 | EX3420 | PROTEIN | Vingi-1 | N-terminal dead Cas9 (D10A, H840A) Vingi-1 |
| | | | | fusion |
| 260 | EX3221 | DNA | Vingi-1 | Plasmid encoding Vingi-1 driver mRNA with |
| | | | | WPRE 3′ UTR |
| 261 | EX3222 | DNA | Vingi-1 | Plasmid encoding Vingi-1 driver mRNA with |
| | | | | Human alpha globin 3′ UTR |
| 262 | EX3223 | DNA | Vingi-1 | Plasmid encoding Vingi-1 driver mRNA with |
| | | | | human alpha globin 5′UTR |
| 263 | EX3257 | PROTEIN | Vingi-1 | N-terminal i53 Vingi-1 fusion |
| 264 | EX3529 | PROTEIN | Vingi-1 | C-terminal MDC1 fusion to Vingi-1 |
| 265 | EX3240 | PROTEIN | Vingi-1 | C-terminal BRCA2-derived peptide Vingi-1 |
| | | | | fusion |
| 266 | EX3255 | PROTEIN | Vingi-1 | N-terminal PolD3 Vingi-1 fusion |
| 267 | EX3258 | PROTEIN | Vingi-1 | C-terminal ctI53tide 15-5 fusion |
| 268 | EX3525 | PROTEIN | Vingi-1 | Vingi-1 driver N-terminal TOPBP1 NLS fusion |
| 269 | EX3527 | PROTEIN | Vingi-1 | Vingi-1 driver N-terminal PARP1 NLS fusion |
| 270 | EX3528 | PROTEIN | Vingi-1 | C-terminal ANKRD28 Vingi-1 fusion |
| 271 | EX3531 | PROTEIN | Vingi-1 | C-terminal RAD17 Vingi-1 fusion |
| 272 | EX3532 | PROTEIN | Vingi-1 | C-terminal SCML1 fusion to Vingi-1 |
| 273 | EX3533 | PROTEIN | Vingi-1 | C-terminal CDKN2a Vingi-1 fusion |
| 274 | EX3534 | PROTEIN | Vingi-1 | C-terminal CHAF1A PCNA-interaction motif |
| | | | | to Vingi-1 driver |
| 275 | EX3518 | PROTEIN | Vingi-1 | N-terminal fusion of paRecT to Vingi-1 driver |
| 276 | EX3530 | PROTEIN | Vingi-1 | C-terminal fusion of MSH4 to Vingi-1 |
| 277 | EX3526 | PROTEIN | Vingi-1 | C-terminal fusion MDM2 NLS to Vingi-1 |
| 293 | EX661 | PROTEIN | ZFL2-2 | N-terminal Cas9 fusion to ZFL2-2 |
| 294 | EX662 | PROTEIN | ZFL2-2 | N-terminal Cas9 nickase (H840A) fusion to |
| | | | | ZFL2-2 endonuclease domain mutant (D216A) |
| 295 | EX274 | PROTEIN | ZFL2-2 | N-terminal dead Cas9 ZFL2-2 fusion |
| 296 | EX3419 | PROTEIN | Vingi-1 | N-terminal nickase Cas9 (H840A) fusion to |
| | | | | Vingi-1 driver with endonuclease domain |
| | | | | mutation (D191A) |
| 297 | EX3420 | PROTEIN | Vingi-1 | N-terminal dead Cas9 fusion to Vingi-1 driver |
| 298 | EX4758 | PROTEIN | Vingi-1 | Vingi-1-Acar-D51A-S6 driver D51A mutant |
| 299 | EX4759 | PROTEIN | Vingi-1 | Vingi-1-Acar-D138A-S6 driver D138A mutant |
| 300 | EX4760 | PROTEIN | Vingi-1 | Vingi-1-Acar-D149A-S6 driver D149A mutant |
| 301 | EX4761 | PROTEIN | Vingi-1 | Vingi-1-Acar-D152A-S6 driver D152A mutant |
| 302 | EX4762 | PROTEIN | Vingi-1 | Vingi-1-Acar-D172A-S6 driver D172A mutant |
| 303 | EX4763 | PROTEIN | Vingi-1 | Vingi-1-Acar-D118A-S6 driver D118A mutant |
| 304 | EX4764 | PROTEIN | Vingi-1 | Vingi-1-Acar-Q215A-S6 driver Q215A mutant |
| 305 | EX291 | PROTEIN | ZFL2-2 | L22 D216A endonuclease domain mutant |
| 306 | EX276 | PROTEIN | ZFL2-2 | L22 D237A endonuclease domain mutant |
| 307 | EX663 | PROTEIN | ZFL2-2 | N-terminal Cas9 L22 endonuclease mutant |
| | | | | fusion |
| 308 | | PROTEIN | Heterologous | BRCA2-derived peptide |
| 309 | | PROTEIN | Heterologous | DSS1-derived peptide |
| 310 | | PROTEIN | Heterologous | CtIP-derived peptide |
| 311 | | PROTEIN | Heterologous | RAD51 protein |
| 312 | | PROTEIN | Heterologous | Nibrin MRE11 recruitment peptide |
| 313 | | PROTEIN | Heterologous | MDM2 p53 inhibitory peptide |
| 314 | | PROTEIN | Heterologous | p53-inhibiting peptide |
| 315 | | PROTEIN | Heterologous | Nanog-derived peptide |
| 316 | | PROTEIN | Heterologous | E. coli RNaseH1 domain |
| 317 | | PROTEIN | Heterologous | human RNase H1 catalytic domain |
| 318 | | PROTEIN | Heterologous | Zinc finger AAVS1 DNA-binding domain |
| 319 | EX2107 | DNA | ZFL2-2 | Plasmid encoding ZFL2-2-drivenGFP reporter. |
| 320 | EX2561 | DNA | ZFL2-2 | Plasmid encoding ZFL2-2 driver |
| 321 | EX2556 | DNA | ZFL2-2 | Plasmid encoding ZFL2-2 driver with N- |
| | | | | terminal HMGN1, N647K mutation, C-terminal |
| | | | | UL12 fusion followed by C-terminal HMGB1 |
| | | | | fusion. |
| 322 | EX2195 | DNA | ZFL2-2 | Plasmid encoding ZFL2-2 driver with N- |
| | | | | terminal HMGN1, N647K and I343K |
| | | | | mutations, C-terminal UL12 fusion followed by |
| | | | | C-terminal HMGB1 fusion |
| 323 | EX2196 | DNA | ZFL2-2 | Plasmid encoding ZFL2-2 driver with N- |
| | | | | terminal HMGN1, D64K, N647K, and I343K |
| | | | | mutations, C-terminal UL12 fusion followed by |
| | | | | C-terminal HMGB1 fusion |
| 324 | EX2199 | DNA | ZFL2-2 | Plasmid encoding ZFL2-2 driver with N- |
| | | | | terminal HMGN1, D64K, N647K, L825G, and |
| | | | | I343K mutations, C-terminal UL12 fusion |
| | | | | followed by C-terminal HMGB1 fusion. |
| 325 | EX2200 | DNA | ZFL2-2 | Plasmid encoding ZFL2-2 driver with N- |
| | | | | terminal HMGN1, D64K, N647K, M750L, and |
| | | | | I343K mutations, C-terminal UL12 fusion |
| | | | | followed by C-terminal HMGB1 fusion |
| 326 | EX2985 | DNA | Vingi-1 | Plasmid encoding Vingi-1 driver |
| 327 | EX2985 | PROTEIN | Vingi-1 | Vingi-1 driver protein |
| 328 | EX2988 | DNA | Vingi-1 | Vingi-1 GFP reporter gene delivery construct |
| 329 | | PROTEIN | Heterologous | GP45 protein from T4 phage |
| 330 | | PROTEIN | Heterologous | dead Cas9 (D10A H840A) |
| 331 | | PROTEIN | Heterologous | PCSK9 homing endonuclease |
| 332 | | PROTEIN | Heterologous | PCSK9 homing nickase (Q47E) |
| 333 | | PROTEIN | Heterologous | Cas9 nickase (H840A) |
| 334 | | PROTEIN | Heterologous | Rigid linker |
| 335 | | PROTEIN | Heterologous | GS linker 1 |
| 336 | | PROTEIN | Heterologous | GS linker 2 |
| 337 | | PROTEIN | Heterologous | GS linker 3 |
| 338 | | PROTEIN | Heterologous | GS linker 4 |
| 339 | | PROTEIN | Heterologous | GS linker 5 |
| 340 | | PROTEIN | Heterologous | GS linker 6 |
| 341 | EX120 | PROTEIN | ZFL2-2 | L2-2 with I343K mutation |
| 342 | EX121 | PROTEIN | ZFL2-2 | L2-2 with Q372 mutation |
| 343 | EX122 | PROTEIN | ZFL2-2 | L2-2 with E366N mutation |
| 344 | EX123 | PROTEIN | ZFL2-2 | L2-2 with L354N mutation |
| 345 | EX124 | PROTEIN | ZFL2-2 | L2-2 with D588A mutation |
| 346 | EX125 | PROTEIN | ZFL2-2 | L2-2 with E616R and S617K mutation |
| 347 | EX126 | PROTEIN | ZFL2-2 | L2-2 with N647K mutation |
| 348 | EX127 | PROTEIN | ZFL2-2 | L2-2 with A688V mutation |
| 349 | EX128 | PROTEIN | ZFL2-2 | L2-2 with A688I mutation |
| 350 | EX129 | PROTEIN | ZFL2-2 | L2-2 with Y139K mutation |
| 351 | EX130 | PROTEIN | ZFL2-2 | L2-2 with D64K mutation |
| 352 | EX131 | PROTEIN | ZFL2-2 | L2-2 with S960R mutation |
| 353 | EX132 | PROTEIN | ZFL2-2 | L2-2 with D550T mutation |
| 354 | EX133 | PROTEIN | ZFL2-2 | L2-2 with L444F mutation |
| 355 | EX134 | PROTEIN | ZFL2-2 | L2-2 with D770H mutation |
| 356 | EX135 | PROTEIN | ZFL2-2 | L2-2 with I625L mutation |
| 357 | EX136 | PROTEIN | ZFL2-2 | L2-2 with H521P mutation |
| 358 | EX137 | PROTEIN | ZFL2-2 | L2-2 with S737P mutation |
| 359 | EX138 | PROTEIN | ZFL2-2 | L2-2 with P705A mutation |
| 360 | EX139 | PROTEIN | ZFL2-2 | L2-2 with M558L mutation |
| 361 | EX140 | PROTEIN | ZFL2-2 | L2-2 with M733L mutation |
| 362 | EX141 | PROTEIN | ZFL2-2 | L2-2 with M760S mutation |
| 363 | EX142 | PROTEIN | ZFL2-2 | L2-2 with M750L mutation |
| 364 | EX143 | PROTEIN | ZFL2-2 | L2-2 with A757P mutation |
| 365 | EX144 | PROTEIN | ZFL2-2 | L2-2 with H717A mutation |
| 366 | EX145 | PROTEIN | ZFL2-2 | L2-2 with H717K mutation |
| 367 | EX146 | PROTEIN | ZFL2-2 | L2-2 with D497S mutation |
| 368 | EX147 | PROTEIN | ZFL2-2 | L2-2 with I625H mutation |
| 372 | | DNA | Vingi-1 | Vingi-1 RNA stem loop |
| 373 | | DNA | Vingi-1 | Vingi-1 RNA microsattelite |
| 374 | | DNA | ZFL2-2 | L22 RNA stem loop |
| 375 | | DNA | ZFL2-2 | L22 RNA microsattelite |
| 376 | EX3335 | PROTEIN | Vingi-1 | Vingi-1 driver with F238Y + M16I mutations |
| 377 | | PROTEIN | Heterologous | Sso7D protein from Saccharolobus solfataricus |
| 378 | | PROTEIN | Heterologous | Vif protein from HIV |
| 379 | | PROTEIN | Heterologous | Vif-derived peptide |
| 380 | | PROTEIN | Heterologous | Vif-derived peptide |
| 381 | | PROTEIN | Heterologous | paRecT from Pseudomonas aeruginosa |
| 382 | | PROTEIN | Heterologous | i53 |
| 383 | | PROTEIN | Heterologous | TOPBP1 NLS |
| 384 | | PROTEIN | Heterologous | PARP1 NLS |
| 385 | | PROTEIN | Heterologous | human PolD3 |
| 386 | | PROTEIN | Heterologous | Rad17 protein fragment |
| 387 | | PROTEIN | Heterologous | SCML1 protein fragment |
| 388 | | PROTEIN | Heterologous | MDC1 protein fragment |
| 389 | | PROTEIN | Heterologous | CDKN2a protein fragment |
| 390 | | PROTEIN | Heterologous | MDM2 NLS |
| 391 | | PROTEIN | Heterologous | FEN1 PCNA interaction motif |
| 392 | | PROTEIN | Heterologous | MSH4 protein fragment |
| 393 | | DNA | Heterologous | WPRE 3′ UTR |
| 394 | | PROTEIN | Heterologous | FEN1 PCNA interaction motif |
| 395 | | PROTEIN | Heterologous | P21 PCNA interaction motif |
| 396 | | PROTEIN | Heterologous | ANKRD28 protein fragment |
| 397 | EX3415 | DNA | Heterolog | Plasmid encoding mRNA for Vingi-1 with |
| | | | | altered codons |
| 398 | EX2996 | DNA | Heterolog | Plasmid encoding Vingi-1 reporter gene |
| | | | | delivery construct with Kymriah transgene |
| | | | | under EF-1a promoter |
| 400 | EX174 | PROTEIN | Heterologous | SpCas9 nuclease |
| 401 | | PROTEIN | Heterologous | TALE AAVS1 DNA binding domain |
| 402 | | PROTEIN | Heterologous | StkC DNA binding protein |

[0802] Mutant A684S showed a large increase in integration efficiency of CAR transgene after 12 days (approximately 50% increased relative to wild type). Robust cellular expression of CAR transgene was observed for all constructs.

### EQUIVALENTS

[0803] While several inventive embodiments have been described and illustrated herein, those of ordinary skill in the art will readily envision a variety of other means and/or structures for performing the function and/or obtaining the results and/or one or more of the advantages described herein, and each of such variations and/or modifications is deemed to be within the scope of the inventive embodiments described herein. More generally, those skilled in the art will readily appreciate that all parameters, dimensions, materials, and configurations described herein are meant to be exemplary and that the actual parameters, dimensions, materials, and/or configurations will depend upon the specific application or applications for which the inventive teachings is/are used. Those skilled in the art will recognize or be able to ascertain using no more than routine experimentation, many equivalents to the specific inventive embodiments described herein. It is, therefore, to be understood that the foregoing embodiments are presented by way of example only and that, within the scope of the appended claims and equivalents thereto, inventive embodiments may be practiced otherwise than as specifically described and claimed. Inventive embodiments of the present disclosure are directed to each individual feature, system, article, material, kit, and/or method described herein. In addition, any combination of two or more such features, systems, articles, materials, kits, and/or methods, if such features, systems, articles, materials, kits, and/or methods are not mutually inconsistent, is included within the inventive scope of the present disclosure.

[0804] All definitions, as defined and used herein, should be understood to control over dictionary definitions, definitions in documents incorporated by reference, and/or ordinary meanings of the defined terms.

[0805] All references, patents and patent applications disclosed herein are incorporated by reference with respect to the subject matter for which each is cited, which in some cases may encompass the entirety of the document.

[0806] The indefinite articles “a” and “an,” as used herein in the specification and in the claims, unless clearly indicated to the contrary, should be understood to mean “at least one.”

[0807] The phrase “and/or,” as used herein in the specification and in the claims, should be understood to mean “any or all” of the elements conjoined, i.e., elements that are conjunctively present in some cases and disjunctively present in other cases. Multiple elements listed with “and/or” should be construed in the same fashion, i.e., “one or more” of the elements so conjoined. Other elements may optionally be present other than the elements specifically identified by the “and/or” clause, whether related or unrelated to those elements specifically identified. Thus, as a non-limiting example, a reference to “A and/or B”, when used in conjunction with open-ended language such as “comprising” can refer, in one embodiment, to A only (optionally including elements other than B); in another embodiment, to B only (optionally including elements other than A); in yet another embodiment, to both A and B (optionally including other elements); etc.

[0808] As used herein in the specification and in the claims, “or” should be understood to have the same meaning as “and/or” as defined above. For example, when separating items in a list, “or” or “and/or” shall be interpreted as being inclusive, i.e., the inclusion of at least one, but also including more than one, of a number or list of elements, and, optionally, additional unlisted items. Only terms clearly indicated to the contrary, such as “only one of” or “exactly one of,” or, when used in the claims, “consisting of,” will refer to the inclusion of exactly one element of a number or list of elements. In general, the term “or” as used herein shall only be interpreted as indicating exclusive alternatives (i.e., “one or the other but not both”) when preceded by terms of exclusivity, such as “either,” “one of,” “only one of,” or “exactly one of.” “Consisting essentially of,” when used in the claims, shall have its ordinary meaning as used in the field of patent law.

[0809] As used herein in the specification and in the claims, the phrase “at least one,” in reference to a list of one or more elements, should be understood to mean at least one element selected from any one or more of the elements in the list of elements, but not necessarily including at least one of each and every element specifically listed within the list of elements and not excluding any combinations of elements in the list of elements. This definition also allows that elements may optionally be present other than the elements specifically identified within the list of elements to which the phrase “at least one” refers, whether related or unrelated to those elements specifically identified. Thus, as a non-limiting example, “at least one of A and B” (or, equivalently, “at least one of A or B,” or, equivalently “at least one of A and/or B”) can refer, in one embodiment, to at least one, optionally including more than one, A, with no B present (and optionally including elements other than B); in another embodiment, to at least one, optionally including more than one, B, with no A present (and optionally including elements other than A); in yet another embodiment, to at least one, optionally including more than one, A, and at least one, optionally including more than one, B (and optionally including other elements); etc.

[0810] It should also be understood that, unless clearly indicated to the contrary, in any methods claimed herein that include more than one step or act, the order of the steps or acts of the method is not necessarily limited to the order in which the steps or acts of the method are recited.

[0811] In the claims, as well as in the specification above, all transitional phrases such as “comprising,” “including,” “carrying,” “having,” “containing,” “involving,” “holding,” “composed of,” and the like are to be understood to be open-ended, i.e., to mean including but not limited to. Only the transitional phrases “consisting of” and “consisting essentially of” shall be closed or semi-closed transitional phrases, respectively, as set forth in the United States Patent Office Manual of Patent Examining Procedures, Section 2111.03. It should be appreciated that embodiments described in this document using an open-ended transitional phrase (e.g., “comprising”) are also contemplated, in alternative embodiments, as “consisting of” and “consisting essentially of” the feature described by the open-ended transitional phrase. For example, if the disclosure describes “a composition comprising A and B”, the disclosure also contemplates the alternative embodiments “a composition consisting of A and B” and “a composition consisting essentially of A and B”.

The application's sequence listing, which the Patent Office published only in electronic form, follows.

SEQUENCE LISTING (402 sequences)

SEQ ID NO: 1 - protein, 1285 aa, synthetic construct
MAPKKKRKVNISGSSCGSPNSADTSSDFKDLWTKLKECHDREVQGLQVKVTKLKQERILDAQRLEEFFTKNQQLREQQKVLHETIKVLEDRLRAGLCDRCAVTEEHMRKKQQEFENIRQQNLKLITELMNERNTLQEENKKLSEQLQQKIENDQQHQAAELECEEDVIPDSPITAFSFSGVNRLRRKENPHVRYIEQTHTKLEHSVCANEMRKVSKSSTHPQHNPNENEILVADTYDQSQSPMAKAHGTSSYTPDKSSFNLATVVAETLGLGVQEESETQGPMSPLGDELYHCLEGNHKKQPFESGSETPGTSESATPEGSCFLIPVVTNTRKTREVRCKRNPHNLRSIHVSTISQLSLSVGLWNCQSAVNKADFITSIATYSDYNLMALTETWLRPEDTATHATLSANFSFSHTPRQTGRGGGTGLLISKEWKFTLIPSLPTISSFEFHAVTIIHPFYINVVVIYRPPGKLGHFLDELDVLLSSFSNFDTPLLVLGDFNIYVDKPQAADFQTLLASFDLKRAPTSATHKSGNQLDLIYTRHCFTDQTIVTPLQISDHFLLSLNIHITPEPPHTPTLVTFRRNLRSLSPNRLSTIVSDSLPPSRKLTALDSNSATNTLCSTLASCLDRLCPLASRPARASPPAPWLSDALREHRSKLRAAERIWRKTKNPAHLLTYQTLLSSFSAEVTSAKQTYYRLKINNATNPRLLFKTFSSLLYPPPPPASSTLTTDDFATFFCTKTAKISAQFAAPTTNTQDTTPTPHTLTSFSQLSESEVSKLVLSSHATTCPLDPIPSHLLQAISPAVIPTLTHIINTSLDSGLFPTTFKQARVTPLLKKPNLDHTLLENYRPVSLLPFMAKILEKVVFNQVLDFLTQNNLMDNKQSGFKKGHSTETALLSVVEDLRLAKADSKSSVLILLDLSAAFDTVNHQILLSTLESLGVAGTVIQWFRSYLSDRSFRVSWRGEVSNLQHLNTGVPQGSVLGPLLFSIYTSSLGPVIQRHGFSYHCYADDTQLYLSFHPDDPSVPARISACLLDISHWMKDHHLQLNLAKTEMLVVSANPTLHHNFSIQMDGATITASKMVKSLGVTIDDQLNFSDHISRTARSCRFALYNIRKIRPFLSEHAAQLLVQALVLSKLDYCNSLLALLPANSIKPLQLLQNAAARVVFNEPKRAHVTPLLVRLHWLPVAARIKFKTLMFAYKVTSGLAPSYLHSLLQIYVPSRNLRSVNERRLVVPSQRGKKSLSRTLTLNLPSWWNELPNCIRTAESLAIFKKRLKTQLFSLHFTS

SEQ ID NO: 2 - protein, 1341 aa, synthetic construct
MAPKKKRKVGIHGVPAAAMQMQLEANADTSVEEESFGPQPISRLEQCGINANDVKKLEEAGFHTVEAVAYAPKKELINIKGISEAKADKILAEAAKLVPMGFTTETEFHQRRSEIIQITTGSKELDKLLQGGIETGSITEMFGEFRTGKTQICHTLAVTCQLPIDRGGGEGKAMYIDTEGTFRPERLLAVAERYGLSGSDVLDNVAYARAFNTDHQTQLLYQASAMMVESRYALLIVDSATALYRTDYSGRGELSARQMHLARFLRMLLRLADEFGVAVVITNQVVAQVDGAAMFAADPKKPIGGNIIAHASTTRLYLRKGRGETRICKIYDSPCLPEAEAMFAINADGVGDAKDGGSGSETPGTSESATPESGGSGCFLIPVVTNTRKTREVRCKRNPHNLRSIHVSTISQLSLSVGLWNCQSAVNKADFITSIATYSDYNLMALTETWLRPEDTATHATLSANFSFSHTPRQTGRGGGTGLLISKEWKFTLIPSLPTISSFEFHAVTIIHPFYINVVVIYRPPGKLGHFLDELDVLLSSFSNFDTPLLVLGDFNIYVDKPQAADFQTLLASFDLKRAPTSATHKSGNQLDLIYTRHCFTDQTIVTPLQISDHFLLSLNIHITPEPPHTPTLVTFRRNLRSLSPNRLSTIVSDSLPPSRKLTALDSNSATNTLCSTLASCLDRLCPLASRPARASPPAPWLSDALREHRSKLRAAERIWRKTKNPAHLLTYQTLLSSFSAEVTSAKQTYYRLKINNATNPRLLFKTFSSLLYPPPPPASSTLTTDDFATFFCTKTAKISAQFAAPTTNTQDTTPTPHTLTSFSQLSESEVSKLVLSSHATTCPLDPIPSHLLQAISPAVIPTLTHIINTSLDSGLFPTTFKQARVTPLLKKPNLDHTLLENYRPVSLLPFMAKILEKVVFNQVLDFLTQNNLMDNKQSGFKKGHSTETALLSVVEDLRLAKADSKSSVLILLDLSAAFDTVNHQILLSTLESLGVAGTVIQWFRSYLSDRSFRVSWRGEVSNLQHLNTGVPQGSVLGPLLFSIYTSSLGPVIQRHGFSYHCYADDTQLYLSFHPDDPSVPARISACLLDISHWMKDHHLQLNLAKTEMLVVSANPTLHHNFSIQMDGATITASKMVKSLGVTIDDQLNFSDHISRTARSCRFALYNIRKIRPFLSEHAAQLLVQALVLSKLDYCNSLLALLPANSIKPLQLLQNAAARVVFNEPKRAHVTPLLVRLHWLPVAARIKFKTLMFAYKVTSGLAPSYLHSLLQIYVPSRNLRSVNERRLVVPSQRGKKSLSRTLTLNLPSWWNELPNCIRTAESLAIFKKRLKTQLFSLHFTS

SEQ ID NO: 3 - protein, 1113 aa, synthetic construct
MAPKKKRKVESTVGPACPPGRTVTKRPWALAEDTPRGPDSPPKRPRPNSLPLTTTFRPLPPPPQTTSAVDPSSHSPVNPPRDQHATDTADEKPRAASPALSDASGPPTPDIPLSPGGTHARDPDADPDSPDLDSGSETPGTSESATPESCFLIPVVTNTRKTREVRCKRNPHNLRSIHVSTISQLSLSVGLWNCQSAVNKADFITSIATYSDYNLMALTETWLRPEDTATHATLSANFSFSHTPRQTGRGGGTGLLISKEWKFTLIPSLPTISSFEFHAVTIIHPFYINVVVIYRPPGKLGHFLDELDVLLSSFSNFDTPLLVLGDFNIYVDKPQAADFQTLLASFDLKRAPTSATHKSGNQLDLIYTRHCFTDQTIVTPLQISDHFLLSLNIHITPEPPHTPTLVTFRRNLRSLSPNRLSTIVSDSLPPSRKLTALDSNSATNTLCSTLASCLDRLCPLASRPARASPPAPWLSDALREHRSKLRAAERIWRKTKNPAHLLTYQTLLSSFSAEVTSAKQTYYRLKINNATNPRLLFKTFSSLLYPPPPPASSTLTTDDFATFFCTKTAKISAQFAAPTTNTQDTTPTPHTLTSFSQLSESEVSKLVLSSHATTCPLDPIPSHLLQAISPAVIPTLTHIINTSLDSGLFPTTFKQARVTPLLKKPNLDHTLLENYRPVSLLPFMAKILEKVVFNQVLDFLTQNNLMDNKQSGFKKGHSTETALLSVVEDLRLAKADSKSSVLILLDLSAAFDTVNHQILLSTLESLGVAGTVIQWFRSYLSDRSFRVSWRGEVSNLQHLNTGVPQGSVLGPLLFSIYTSSLGPVIQRHGFSYHCYADDTQLYLSFHPDDPSVPARISACLLDISHWMKDHHLQLNLAKTEMLVVSANPTLHHNFSIQMDGATITASKMVKSLGVTIDDQLNFSDHISRTARSCRFALYNIRKIRPFLSEHAAQLLVQALVLSKLDYCNSLLALLPANSIKPLQLLQNAAARVVFNEPKRAHVTPLLVRLHWLPVAARIKFKTLMFAYKVTSGLAPSYLHSLLQIYVPSRNLRSVNERRLVVPSQRGKKSLSRTLTLNLPSWWNELPNCIRTAESLAIFKKRLKTQLFSLHFTS

SEQ ID NO: 4 - protein, 1012 aa, synthetic construct
MAPKKKRKVPTLLGFHTASGKKVKIAKESLDKVKNLFDEKEQGGSGGGCFLIPVVTNTRKTREVRCKRNPHNLRSIHVSTISQLSLSVGLWNCQSAVNKADFITSIATYSDYNLMALTETWLRPEDTATHATLSANFSFSHTPRQTGRGGGTGLLISKEWKFTLIPSLPTISSFEFHAVTIIHPFYINVVVIYRPPGKLGHFLDELDVLLSSFSNFDTPLLVLGDFNIYVDKPQAADFQTLLASFDLKRAPTSATHKSGNQLDLIYTRHCFTDQTIVTPLQISDHFLLSLNIHITPEPPHTPTLVTFRRNLRSLSPNRLSTIVSDSLPPSRKLTALDSNSATNTLCSTLASCLDRLCPLASRPARASPPAPWLSDALREHRSKLRAAERIWRKTKNPAHLLTYQTLLSSFSAEVTSAKQTYYRLKINNATNPRLLFKTFSSLLYPPPPPASSTLTTDDFATFFCTKTAKISAQFAAPTTNTQDTTPTPHTLTSFSQLSESEVSKLVLSSHATTCPLDPIPSHLLQAISPAVIPTLTHIINTSLDSGLFPTTFKQARVTPLLKKPNLDHTLLENYRPVSLLPFMAKILEKVVFNQVLDFLTQNNLMDNKQSGFKKGHSTETALLSVVEDLRLAKADSKSSVLILLDLSAAFDTVNHQILLSTLESLGVAGTVIQWFRSYLSDRSFRVSWRGEVSNLQHLNTGVPQGSVLGPLLFSIYTSSLGPVIQRHGFSYHCYADDTQLYLSFHPDDPSVPARISACLLDISHWMKDHHLQLNLAKTEMLVVSANPTLHHNFSIQMDGATITASKMVKSLGVTIDDQLNFSDHISRTARSCRFALYNIRKIRPFLSEHAAQLLVQALVLSKLDYCNSLLALLPANSIKPLQLLQNAAARVVFNEPKRAHVTPLLVRLHWLPVAARIKFKTLMFAYKVTSGLAPSYLHSLLQIYVPSRNLRSVNERRLVVPSQRGKKSLSRTLTLNLPSWWNELPNCIRTAESLAIFKKRLKTQLFSLHFTS

SEQ ID NO: 5 - protein, 1050 aa, synthetic construct
MAPKKKRKVSEKKQPVDLGLLEEDDEFEEFPAEDWAGLDEDEDAHVWEDNWDDDNVEDDFSNQLRAELEKHGYKMETSGGSGGGSGCFLIPVVTNTRKTREVRCKRNPHNLRSIHVSTISQLSLSVGLWNCQSAVNKADFITSIATYSDYNLMALTETWLRPEDTATHATLSANFSFSHTPRQTGRGGGTGLLISKEWKFTLIPSLPTISSFEFHAVTIIHPFYINVVVIYRPPGKLGHFLDELDVLLSSFSNFDTPLLVLGDFNIYVDKPQAADFQTLLASFDLKRAPTSATHKSGNQLDLIYTRHCFTDQTIVTPLQISDHFLLSLNIHITPEPPHTPTLVTFRRNLRSLSPNRLSTIVSDSLPPSRKLTALDSNSATNTLCSTLASCLDRLCPLASRPARASPPAPWLSDALREHRSKLRAAERIWRKTKNPAHLLTYQTLLSSFSAEVTSAKQTYYRLKINNATNPRLLFKTFSSLLYPPPPPASSTLTTDDFATFFCTKTAKISAQFAAPTTNTQDTTPTPHTLTSFSQLSESEVSKLVLSSHATTCPLDPIPSHLLQAISPAVIPTLTHIINTSLDSGLFPTTFKQARVTPLLKKPNLDHTLLENYRPVSLLPFMAKILEKVVFNQVLDFLTQNNLMDNKQSGFKKGHSTETALLSVVEDLRLAKADSKSSVLILLDLSAAFDTVNHQILLSTLESLGVAGTVIQWFRSYLSDRSFRVSWRGEVSNLQHLNTGVPQGSVLGPLLFSIYTSSLGPVIQRHGFSYHCYADDTQLYLSFHPDDPSVPARISACLLDISHWMKDHHLQLNLAKTEMLVVSANPTLHHNFSIQMDGATITASKMVKSLGVTIDDQLNFSDHISRTARSCRFALYNIRKIRPFLSEHAAQLLVQALVLSKLDYCNSLLALLPANSIKPLQLLQNAAARVVFNEPKRAHVTPLLVRLHWLPVAARIKFKTLMFAYKVTSGLAPSYLHSLLQIYVPSRNLRSVNERRLVVPSQRGKKSLSRTLTLNLPSWWNELPNCIRTAESLAIFKKRLKTQLFSLHFTS

SEQ ID NO: 6 - protein, 1080 aa, synthetic construct
MPKRKVSSAEGAAKEEPKRRSARLSAKPPAKVEAKPKKAAAKDKSSDKKVQTKGKRGAKGKQAEVANQETKEDLPAENGETKTEESPASDEAGEKEAKSDSGSETPGTSESATPESCFLIPVVTNTRKTREVRCKRNPHNLRSIHVSTISQLSLSVGLWNCQSAVNKADFITSIATYSDYNLMALTETWLRPEDTATHATLSANFSFSHTPRQTGRGGGTGLLISKEWKFTLIPSLPTISSFEFHAVTIIHPFYINVVVIYRPPGKLGHFLDELDVLLSSFSNFDTPLLVLGDFNIYVDKPQAADFQTLLASFDLKRAPTSATHKSGNQLDLIYTRHCFTDQTIVTPLQISDHFLLSLNIHITPEPPHTPTLVTFRRNLRSLSPNRLSTIVSDSLPPSRKLTALDSNSATNTLCSTLASCLDRLCPLASRPARASPPAPWLSDALREHRSKLRAAERIWRKTKNPAHLLTYQTLLSSFSAEVTSAKQTYYRLKINNATNPRLLFKTFSSLLYPPPPPASSTLTTDDFATFFCTKTAKISAQFAAPTTNTQDTTPTPHTLTSFSQLSESEVSKLVLSSHATTCPLDPIPSHLLQAISPAVIPTLTHIINTSLDSGLFPTTFKQARVTPLLKKPNLDHTLLENYRPVSLLPFMAKILEKVVFNQVLDFLTQNNLMDNKQSGFKKGHSTETALLSVVEDLRLAKADSKSSVLILLDLSAAFDTVNHQILLSTLESLGVAGTVIQWFRSYLSDRSFRVSWRGEVSNLQHLNTGVPQGSVLGPLLFSIYTSSLGPVIQRHGFSYHCYADDTQLYLSFHPDDPSVPARISACLLDISHWMKDHHLQLNLAKTEMLVVSANPTLHHNFSIQMDGATITASKMVKSLGVTIDDQLNFSDHISRTARSCRFALYNIRKIRPFLSEHAAQLLVQALVLSKLDYCNSLLALLPANSIKPLQLLQNAAARVVFNEPKRAHVTPLLVRLHWLPVAARIKFKTLMFAYKVTSGLAPSYLHSLLQIYVPSRNLRSVNERRLVVPSQRGKKSLSRTLTLNLPSWWNELPNCIRTAESLAIFKKRLKTQLFSLHFTS

SEQ ID NO: 7 - protein, 1085 aa, synthetic construct
MCFLIPVVTNTRKTREVRCKRNPHNLRSIHVSTISQLSLSVGLWNCQSAVNKADFITSIATYSDYNLMALTETWLRPEDTATHATLSANFSFSHTPRQTGRGGGTGLLISKEWKFTLIPSLPTISSFEFHAVTIIHPFYINVVVIYRPPGKLGHFLDELDVLLSSFSNFDTPLLVLGDFNIYVDKPQAADFQTLLASFDLKRAPTSATHKSGNQLDLIYTRHCFTDQTIVTPLQISDHFLLSLNIHITPEPPHTPTLVTFRRNLRSLSPNRLSTIVSDSLPPSRKLTALDSNSATNTLCSTLASCLDRLCPLASRPARASPPAPWLSDALREHRSKLRAAERIWRKTKNPAHLLTYQTLLSSFSAEVTSAKQTYYRLKINNATNPRLLFKTFSSLLYPPPPPASSTLTTDDFATFFCTKTAKISAQFAAPTTNTQDTTPTPHTLTSFSQLSESEVSKLVLSSHATTCPLDPIPSHLLQAISPAVIPTLTHIINTSLDSGLFPTTFKQARVTPLLKKPNLDHTLLENYRPVSLLPFMAKILEKVVFNQVLDFLTQNNLMDNKQSGFKKGHSTETALLSVVEDLRLAKADSKSSVLILLDLSAAFDTVNHQILLSTLESLGVAGTVIQWFRSYLSDRSFRVSWRGEVSNLQHLNTGVPQGSVLGPLLFSIYTSSLGPVIQRHGFSYHCYADDTQLYLSFHPDDPSVPARISACLLDISHWMKDHHLQLNLAKTEMLVVSANPTLHHNFSIQMDGATITASKMVKSLGVTIDDQLNFSDHISRTARSCRFALYNIRKIRPFLSEHAAQLLVQALVLSKLDYCNSLLALLPANSIKPLQLLQNAAARVVFNEPKRAHVTPLLVRLHWLPVAARIKFKTLMFAYKVTSGLAPSYLHSLLQIYVPSRNLRSVNERRLVVPSQRGKKSLSRTLTLNLPSWWNELPNCIRTAESLAIFKKRLKTQLFSLHFTSSGSETPGTSESATPEGKGDPKKPRGKMSSYAFFVQTCREEHKKKHPDASVNFSEFSKKCSERWKTMSAKEKGKFEDMAKADKARYEREMKTYIPPKGEGGSGKRTADGSEFESPKKKRKV

SEQ ID NO: 8 - protein, 1050 aa, synthetic construct
MCFLIPVVTNTRKTREVRCKRNPHNLRSIHVSTISQLSLSVGLWNCQSAVNKADFITSIATYSDYNLMALTETWLRPEDTATHATLSANFSFSHTPRQTGRGGGTGLLISKEWKFTLIPSLPTISSFEFHAVTIIHPFYINVVVIYRPPGKLGHFLDELDVLLSSFSNFDTPLLVLGDFNIYVDKPQAADFQTLLASFDLKRAPTSATHKSGNQLDLIYTRHCFTDQTIVTPLQISDHFLLSLNIHITPEPPHTPTLVTFRRNLRSLSPNRLSTIVSDSLPPSRKLTALDSNSATNTLCSTLASCLDRLCPLASRPARASPPAPWLSDALREHRSKLRAAERIWRKTKNPAHLLTYQTLLSSFSAEVTSAKQTYYRLKINNATNPRLLFKTFSSLLYPPPPPASSTLTTDDFATFFCTKTAKISAQFAAPTTNTQDTTPTPHTLTSFSQLSESEVSKLVLSSHATTCPLDPIPSHLLQAISPAVIPTLTHIINTSLDSGLFPTTFKQARVTPLLKKPNLDHTLLENYRPVSLLPFMAKILEKVVFNQVLDFLTQNNLMDNKQSGFKKGHSTETALLSVVEDLRLAKADSKSSVLILLDLSAAFDTVNHQILLSTLESLGVAGTVIQWFRSYLSDRSFRVSWRGEVSNLQHLNTGVPQGSVLGPLLFSIYTSSLGPVIQRHGFSYHCYADDTQLYLSFHPDDPSVPARISACLLDISHWMKDHHLQLNLAKTEMLVVSANPTLHHNFSIQMDGATITASKMVKSLGVTIDDQLNFSDHISRTARSCRFALYNIRKIRPFLSEHAAQLLVQALVLSKLDYCNSLLALLPANSIKPLQLLQNAAARVVFNEPKRAHVTPLLVRLHWLPVAARIKFKTLMFAYKVTSGLAPSYLHSLLQIYVPSRNLRSVNERRLVVPSQRGKKSLSRTLTLNLPSWWNELPNCIRTAESLAIFKKRLKTQLFSLHFTSGGSGVTVKFKYKGEEKEVDISKIKKVWRVGKMISFTYDDNGKTGRGAVSEKDAPKELLQMLEKGGSGKRTADGSEFESPKKKRKV

SEQ ID NO: 9 - protein, 1011 aa, synthetic construct
MCFLIPVVTNTRKTREVRCKRNPHNLRSIHVSTISQLSLSVGLWNCQSAVNKADFITSIATYSDYNLMALTETWLRPEDTATHATLSANFSFSHTPRQTGRGGGTGLLISKEWKFTLIPSLPTISSFEFHAVTIIHPFYINVVVIYRPPGKLGHFLDELDVLLSSFSNFDTPLLVLGDFNIYVDKPQAADFQTLLASFDLKRAPTSATHKSGNQLDLIYTRHCFTDQTIVTPLQISDHFLLSLNIHITPEPPHTPTLVTFRRNLRSLSPNRLSTIVSDSLPPSRKLTALDSNSATNTLCSTLASCLDRLCPLASRPARASPPAPWLSDALREHRSKLRAAERIWRKTKNPAHLLTYQTLLSSFSAEVTSAKQTYYRLKINNATNPRLLFKTFSSLLYPPPPPASSTLTTDDFATFFCTKTAKISAQFAAPTTNTQDTTPTPHTLTSFSQLSESEVSKLVLSSHATTCPLDPIPSHLLQAISPAVIPTLTHIINTSLDSGLFPTTFKQARVTPLLKKPNLDHTLLENYRPVSLLPFMAKILEKVVFNQVLDFLTQNNLMDNKQSGFKKGHSTETALLSVVEDLRLAKADSKSSVLILLDLSAAFDTVNHQILLSTLESLGVAGTVIQWFRSYLSDRSFRVSWRGEVSNLQHLNTGVPQGSVLGPLLFSIYTSSLGPVIQRHGFSYHCYADDTQLYLSFHPDDPSVPARISACLLDISHWMKDHHLQLNLAKTEMLVVSANPTLHHNFSIQMDGATITASKMVKSLGVTIDDQLNFSDHISRTARSCRFALYNIRKIRPFLSEHAAQLLVQALVLSKLDYCNSLLALLPANSIKPLQLLQNAAARVVFNEPKRAHVTPLLVRLHWLPVAARIKFKTLMFAYKVTSGLAPSYLHSLLQIYVPSRNLRSVNERRLVVPSQRGKKSLSRTLTLNLPSWWNELPNCIRTAESLAIFKKRLKTQLFSLHFTSGSGSGSGSKNSTSRNPSGINDDYGQLKNFKKFKKVTYGSPKKKRKV

SEQ ID NO: 10 - protein, 1106 aa, synthetic construct
MCFLIPVVTNTRKTREVRCKRNPHNLRSIHVSTISQLSLSVGLWNCQSAVNKADFITSIATYSDYNLMALTETWLRPEDTATHATLSANFSFSHTPRQTGRGGGTGLLISKEWKFTLIPSLPTISSFEFHAVTIIHPFYINVVVIYRPPGKLGHFLDELDVLLSSFSNFDTPLLVLGDFNIYVDKPQAADFQTLLASFDLKRAPTSATHKSGNQLDLIYTRHCFTDQTIVTPLQISDHFLLSLNIHITPEPPHTPTLVTFRRNLRSLSPNRLSTIVSDSLPPSRKLTALDSNSATNTLCSTLASCLDRLCPLASRPARASPPAPWLSDALREHRSKLRAAERIWRKTKNPAHLLTYQTLLSSFSAEVTSAKQTYYRLKINNATNPRLLFKTFSSLLYPPPPPASSTLTTDDFATFFCTKTAKISAQFAAPTTNTQDTTPTPHTLTSFSQLSESEVSKLVLSSHATTCPLDPIPSHLLQAISPAVIPTLTHIINTSLDSGLFPTTFKQARVTPLLKKPNLDHTLLENYRPVSLLPFMAKILEKVVFNQVLDFLTQNNLMDNKQSGFKKGHSTETALLSVVEDLRLAKADSKSSVLILLDLSAAFDTVNHQILLSTLESLGVAGTVIQWFRSYLSDRSFRVSWRGEVSNLQHLNTGVPQGSVLGPLLFSIYTSSLGPVIQRHGFSYHCYADDTQLYLSFHPDDPSVPARISACLLDISHWMKDHHLQLNLAKTEMLVVSANPTLHHNFSIQMDGATITASKMVKSLGVTIDDQLNFSDHISRTARSCRFALYNIRKIRPFLSEHAAQLLVQALVLSKLDYCNSLLALLPANSIKPLQLLQNAAARVVFNEPKRAHVTPLLVRLHWLPVAARIKFKTLMFAYKVTSGLAPSYLHSLLQIYVPSRNLRSVNERRLVVPSQRGKKSLSRTLTLNLPSWWNELPNCIRTAESLAIFKKRLKTQLFSLHFTSGSGSGSGSCNTNMSVPTDGAVTTSQIPASEQETLVRPKPLLLKLLKSVGAQKDTYTMKEVLFYLGQYIMTKRLYDEKQQHIVYCSNDLLGDLFGVPSFSVKEHRKIYTMIYRNLVVVNQQESSDSGTSVSENGSPKKKRKV

SEQ ID NO: 11 - protein, 1004 aa, synthetic construct
MCFLIPVVTNTRKTREVRCKRNPHNLRSIHVSTISQLSLSVGLWNCQSAVNKADFITSIATYSDYNLMALTETWLRPEDTATHATLSANFSFSHTPRQTGRGGGTGLLISKEWKFTLIPSLPTISSFEFHAVTIIHPFYINVVVIYRPPGKLGHFLDELDVLLSSFSNFDTPLLVLGDFNIYVDKPQAADFQTLLASFDLKRAPTSATHKSGNQLDLIYTRHCFTDQTIVTPLQISDHFLLSLNIHITPEPPHTPTLVTFRRNLRSLSPNRLSTIVSDSLPPSRKLTALDSNSATNTLCSTLASCLDRLCPLASRPARASPPAPWLSDALREHRSKLRAAERIWRKTKNPAHLLTYQTLLSSFSAEVTSAKQTYYRLKINNATNPRLLFKTFSSLLYPPPPPASSTLTTDDFATFFCTKTAKISAQFAAPTTNTQDTTPTPHTLTSFSQLSESEVSKLVLSSHATTCPLDPIPSHLLQAISPAVIPTLTHIINTSLDSGLFPTTFKQARVTPLLKKPNLDHTLLENYRPVSLLPFMAKILEKVVFNQVLDFLTQNNLMDNKQSGFKKGHSTETALLSVVEDLRLAKADSKSSVLILLDLSAAFDTVNHQILLSTLESLGVAGTVIQWFRSYLSDRSFRVSWRGEVSNLQHLNTGVPQGSVLGPLLFSIYTSSLGPVIQRHGFSYHCYADDTQLYLSFHPDDPSVPARISACLLDISHWMKDHHLQLNLAKTEMLVVSANPTLHHNFSIQMDGATITASKMVKSLGVTIDDQLNFSDHISRTARSCRFALYNIRKIRPFLSEHAAQLLVQALVLSKLDYCNSLLALLPANSIKPLQLLQNAAARVVFNEPKRAHVTPLLVRLHWLPVAARIKFKTLMFAYKVTSGLAPSYLHSLLQIYVPSRNLRSVNERRLVVPSQRGKKSLSRTLTLNLPSWWNELPNCIRTAESLAIFKKRLKTQLFSLHFTSGSGSGSGSGSYGFRLGFLHSGTAKSVTCTYGSPKKKRKV

SEQ ID NO: 12 - protein, 1041 aa, synthetic construct
MCFLIPVVTNTRKTREVRCKRNPHNLRSIHVSTISQLSLSVGLWNCQSAVNKADFITSIATYSDYNLMALTETWLRPEDTATHATLSANFSFSHTPRQTGRGGGTGLLISKEWKFTLIPSLPTISSFEFHAVTIIHPFYINVVVIYRPPGKLGHFLDELDVLLSSFSNFDTPLLVLGDFNIYVDKPQAADFQTLLASFDLKRAPTSATHKSGNQLDLIYTRHCFTDQTIVTPLQISDHFLLSLNIHITPEPPHTPTLVTFRRNLRSLSPNRLSTIVSDSLPPSRKLTALDSNSATNTLCSTLASCLDRLCPLASRPARASPPAPWLSDALREHRSKLRAAERIWRKTKNPAHLLTYQTLLSSFSAEVTSAKQTYYRLKINNATNPRLLFKTFSSLLYPPPPPASSTLTTDDFATFFCTKTAKISAQFAAPTTNTQDTTPTPHTLTSFSQLSESEVSKLVLSSHATTCPLDPIPSHLLQAISPAVIPTLTHIINTSLDSGLFPTTFKQARVTPLLKKPNLDHTLLENYRPVSLLPFMAKILEKVVFNQVLDFLTQNNLMDNKQSGFKKGHSTETALLSVVEDLRLAKADSKSSVLILLDLSAAFDTVNHQILLSTLESLGVAGTVIQWFRSYLSDRSFRVSWRGEVSNLQHLNTGVPQGSVLGPLLFSIYTSSLGPVIQRHGFSYHCYADDTQLYLSFHPDDPSVPARISACLLDISHWMKDHHLQLNLAKTEMLVVSANPTLHHNFSIQMDGATITASKMVKSLGVTIDDQLNFSDHISRTARSCRFALYNIRKIRPFLSEHAAQLLVQALVLSKLDYCNSLLALLPANSIKPLQLLQNAAARVVFNEPKRAHVTPLLVRLHWLPVAARIKFKTLMFAYKVTSGLAPSYLHSLLQIYVPSRNLRSVNERRLVVPSQRGKKSLSRTLTLNLPSWWNELPNCIRTAESLAIFKKRLKTQLFSLHFTSGSGSGSGSSLQSCMQFQPNSPASDLEAALEAAGEGLNVIQQTTRYFSTPQTMDLFLNYSMNMQPEDVGSPKKKRKV

SEQ ID NO: 13 - protein, 1136 aa, synthetic construct
MCFLIPVVTNTRKTREVRCKRNPHNLRSIHVSTISQLSLSVGLWNCQSAVNKADFITSIATYSDYNLMALTETWLRPEDTATHATLSANFSFSHTPRQTGRGGGTGLLISKEWKFTLIPSLPTISSFEFHAVTIIHPFYINVVVIYRPPGKLGHFLDELDVLLSSFSNFDTPLLVLGDFNIYVDKPQAADFQTLLASFDLKRAPTSATHKSGNQLDLIYTRHCFTDQTIVTPLQISDHFLLSLNIHITPEPPHTPTLVTFRRNLRSLSPNRLSTIVSDSLPPSRKLTALDSNSATNTLCSTLASCLDRLCPLASRPARASPPAPWLSDALREHRSKLRAAERIWRKTKNPAHLLTYQTLLSSFSAEVTSAKQTYYRLKINNATNPRLLFKTFSSLLYPPPPPASSTLTTDDFATFFCTKTAKISAQFAAPTTNTQDTTPTPHTLTSFSQLSESEVSKLVLSSHATTCPLDPIPSHLLQAISPAVIPTLTHIINTSLDSGLFPTTFKQARVTPLLKKPNLDHTLLENYRPVSLLPFMAKILEKVVFNQVLDFLTQNNLMDNKQSGFKKGHSTETALLSVVEDLRLAKADSKSSVLILLDLSAAFDTVNHQILLSTLESLGVAGTVIQWFRSYLSDRSFRVSWRGEVSNLQHLNTGVPQGSVLGPLLFSIYTSSLGPVIQRHGFSYHCYADDTQLYLSFHPDDPSVPARISACLLDISHWMKDHHLQLNLAKTEMLVVSANPTLHHNFSIQMDGATITASKMVKSLGVTIDDQLNFSDHISRTARSCRFALYNIRKIRPFLSEHAAQLLVQALVLSKLDYCNSLLALLPANSIKPLQLLQNAAARVVFNEPKRAHVTPLLVRLHWLPVAARIKFKTLMFAYKVTSGLAPSYLHSLLQIYVPSRNLRSVNERRLVVPSQRGKKSLSRTLTLNLPSWWNELPNCIRTAESLAIFKKRLKTQLFSLHFTSGSGSGSGSLKQVEIFTDGSCLGNPGPGGYGAILRYRGREKTFSAGYTRTTNNRMELMAAIVALEALKEHCEVILSTDSQYVRQGITQWIHNWKKRGWKTADKKPVKNVDLWQRLDAALGQHQIKWEWVKGHAGHPENERCDELARAAAMNPTLEDTGYQVEVGSPKKKRKV

SEQ ID NO: 14 - protein, 1134 aa, synthetic construct
MCFLIPVVTNTRKTREVRCKRNPHNLRSIHVSTISQLSLSVGLWNCQSAVNKADFITSIATYSDYNLMALTETWLRPEDTATHATLSANFSFSHTPRQTGRGGGTGLLISKEWKFTLIPSLPTISSFEFHAVTIIHPFYINVVVIYRPPGKLGHFLDELDVLLSSFSNFDTPLLVLGDFNIYVDKPQAADFQTLLASFDLKRAPTSATHKSGNQLDLIYTRHCFTDQTIVTPLQISDHFLLSLNIHITPEPPHTPTLVTFRRNLRSLSPNRLSTIVSDSLPPSRKLTALDSNSATNTLCSTLASCLDRLCPLASRPARASPPAPWLSDALREHRSKLRAAERIWRKTKNPAHLLTYQTLLSSFSAEVTSAKQTYYRLKINNATNPRLLFKTFSSLLYPPPPPASSTLTTDDFATFFCTKTAKISAQFAAPTTNTQDTTPTPHTLTSFSQLSESEVSKLVLSSHATTCPLDPIPSHLLQAISPAVIPTLTHIINTSLDSGLFPTTFKQARVTPLLKKPNLDHTLLENYRPVSLLPFMAKILEKVVFNQVLDFLTQNNLMDNKQSGFKKGHSTETALLSVVEDLRLAKADSKSSVLILLDLSAAFDTVNHQILLSTLESLGVAGTVIQWFRSYLSDRSFRVSWRGEVSNLQHLNTGVPQGSVLGPLLFSIYTSSLGPVIQRHGFSYHCYADDTQLYLSFHPDDPSVPARISACLLDISHWMKDHHLQLNLAKTEMLVVSANPTLHHNFSIQMDGATITASKMVKSLGVTIDDQLNFSDHISRTARSCRFALYNIRKIRPFLSEHAAQLLVQALVLSKLDYCNSLLALLPANSIKPLQLLQNAAARVVFNEPKRAHVTPLLVRLHWLPVAARIKFKTLMFAYKVTSGLAPSYLHSLLQIYVPSRNLRSVNERRLVVPSQRGKKSLSRTLTLNLPSWWNELPNCIRTAESLAIFKKRLKTQLFSLHFTSGSGSGSGSGSGDFVVVYTDGCCSSNGRRRPRAGIGVYWGPGHPLNVGIRLPGRQTNQRAEIHAACKAIEQAKTQNINKLVLYTDSMFTINGITNWVQGWKKNGWKTSAGKEVINKEDFVALERLTQGMDIQWMHVPGHSGFIGNEEADRLAREGAKQSEDGSPKKKRKV

SEQ ID NO: 15 - protein, 1253 aa, synthetic construct
MAPKKKRKVGIHGVPAAMAERPFQCRICMRNFSYNWHLQRHIRTHTGEKPFACDICGRKFARSDHLTTHTKIHTGSQKPFQCRICMRNFSHNYARDCHIRTHTGEKPFACDICGRKFAQNSTRIGHTKIHLRGSSGSETPGTSESATPEGIHGVPAAMAERPFQCRICMRNFSQSSNLARHIRTHTGEKPFACDICGRKFARTDYLVDHTKIHTGSQKPFQCRICMRNFSYNTHLTRHIRTHTGEKPFACDICGRKFAQGYNLAGHTKIHLRGSSGSETPGTSESATPECFLIPVVTNTRKTREVRCKRNPHNLRSIHVSTISQLSLSVGLWNCQSAVNKADFITSIATYSDYNLMALTETWLRPEDTATHATLSANFSFSHTPRQTGRGGGTGLLISKEWKFTLIPSLPTISSFEFHAVTIIHPFYINVVVIYRPPGKLGHFLDELDVLLSSFSNFDTPLLVLGDFNIYVDKPQAADFQTLLASFDLKRAPTSATHKSGNQLDLIYTRHCFTDQTIVTPLQISDHFLLSLNIHITPEPPHTPTLVTFRRNLRSLSPNRLSTIVSDSLPPSRKLTALDSNSATNTLCSTLASCLDRLCPLASRPARASPPAPWLSDALREHRSKLRAAERIWRKTKNPAHLLTYQTLLSSFSAEVTSAKQTYYRLKINNATNPRLLFKTFSSLLYPPPPPASSTLTTDDFATFFCTKTAKISAQFAAPTTNTQDTTPTPHTLTSFSQLSESEVSKLVLSSHATTCPLDPIPSHLLQAISPAVIPTLTHIINTSLDSGLFPTTFKQARVTPLLKKPNLDHTLLENYRPVSLLPFMAKILEKVVFNQVLDFLTQNNLMDNKQSGFKKGHSTETALLSVVEDLRLAKADSKSSVLILLDLSAAFDTVNHQILLSTLESLGVAGTVIQWFRSYLSDRSFRVSWRGEVSNLQHLNTGVPQGSVLGPLLFSIYTSSLGPVIQRHGFSYHCYADDTQLYLSFHPDDPSVPARISACLLDISHWMKDHHLQLNLAKTEMLVVSANPTLHHNFSIQMDGATITASKMVKSLGVTIDDQLNFSDHISRTARSCRFALYNIRKIRPFLSEHAAQLLVQALVLSKLDYCNSLLALLPANSIKPLQLLQNAAARVVFNEPKRAHVTPLLVRLHWLPVAARIKFKTLMFAYKVTSGLAPSYLHSLLQIYVPSRNLRSVNERRLVVPSQRGKKSLSRTLTLNLPSWWNELPNCIRTAESLAIFKKRLKTQLFSLHFTS

SEQ ID NO: 16 - protein, 2366 aa, synthetic construct
MAPKKKRKVGRGMDKKYSIGLAIGTNSVGWAVITDEYKVPSKKFKVLGNTDRHSIKKNLIGALLFDSGETAEATRLKRTARRRYTRRKNRICYLQEIFSNEMAKVDDSFFHRLEESFLVEEDKKHERHPIFGNIVDEVAYHEKYPTIYHLRKKLVDSTDKADLRLIYLALAHMIKFRGHFLIEGDLNPDNSDVDKLFIQLVQTYNQLFEENPINASGVDAKAILSARLSKSRRLENLIAQLPGEKKNGLFGNLIALSLGLTPNFKSNFDLAEDAKLQLSKDTYDDDLDNLLAQIGDQYADLFLAAKNLSDAILLSDILRVNTEITKAPLSASMIKRYDEHHQDLTLLKALVRQQLPEKYKEIFFDQSKNGYAGYIDGGASQEEFYKFIKPILEKMDGTEELLVKLNREDLLRKQRTFDNGSIPHQIHLGELHAILRRQEDFYPFLKDNREKIEKILTFRIPYYVGPLARGNSRFAWMTRKSEETITPWNFEEVVDKGASAQSFIERMTNFDKNLPNEKVLPKHSLLYEYFTVYNELTKVKYVTEGMRKPAFLSGEQKKAIVDLLFKTNRKVTVKQLKEDYFKKIECFDSVEISGVEDRFNASLGTYHDLLKIIKDKDFLDNEENEDILEDIVLTLTLFEDREMIEERLKTYAHLFDDKVMKQLKRRRYTGWGRLSRKLINGIRDKQSGKTILDFLKSDGFANRNFMQLIHDDSLTFKEDIQKAQVSGQGDSLHEHIANLAGSPAIKKGILQTVKVVDELVKVMGRHKPENIVIEMARENQTTQKGQKNSRERMKRIEEGIKELGSQILKEHPVENTQLQNEKLYLYYLQNGRDMYVDQELDINRLSDYDVDAIVPQSFLKDDSIDNKVLTRSDKNRGKSDNVPSEEVVKKMKNYWRQLLNAKLITQRKFDNLTKAERGGLSELDKAGFIKRQLVETRQITKHVAQILDSRMNTKYDENDKLIREVKVITLKSKLVSDFRKDFQFYKVREINNYHHAHDAYLNAVVGTALIKKYPKLESEFVYGDYKVYDVRKMIAKSEQEIGKATAKYFFYSNIMNFFKTEITLANGEIRKRPLIETNGETGEIVWDKGRDFATVRKVLSMPQVNIVKKTEVQTGGFSKESILPKRNSDKLIARKKDWDPKKYGGFDSPTVAYSVLVVAKVEKGKSKKLKSVKELLGITIMERSSFEKNPIDFLEAKGYKEVKKDLIIKLPKYSLFELENGRKRMLASAGELQKGNELALPSKYVNFLYLASHYEKLKGSPEDNEQKQLFVEQHKHYLDEIIEQISEFSKRVILADANLDKVLSAYNKHRDKPIREQAENIIHLFTLTNLGAPAAFKYFDTTIDRKRYTSTKEVLDATLIHQSITGLYETRIDLSQLGGDGGSGSETPGTSESATPESGGSGCFLIPVVTNTRKTREVRCKRNPHNLRSIHVSTISQLSLSVGLWNCQSAVNKADFITSIATYSDYNLMALTETWLRPEDTATHATLSANFSFSHTPRQTGRGGGTGLLISKEWKFTLIPSLPTISSFEFHAVTIIHPFYINVVVIYRPPGKLGHFLDELDVLLSSFSNFDTPLLVLGDFNIYVDKPQAADFQTLLASFDLKRAPTSATHKSGNQLDLIYTRHCFTDQTIVTPLQISDHFLLSLNIHITPEPPHTPTLVTFRRNLRSLSPNRLSTIVSDSLPPSRKLTALDSNSATNTLCSTLASCLDRLCPLASRPARASPPAPWLSDALREHRSKLRAAERIWRKTKNPAHLLTYQTLLSSFSAEVTSAKQTYYRLKINNATNPRLLFKTFSSLLYPPPPPASSTLTTDDFATFFCTKTAKISAQFAAPTTNTQDTTPTPHTLTSFSQLSESEVSKLVLSSHATTCPLDPIPSHLLQAISPAVIPTLTHIINTSLDSGLFPTTFKQARVTPLLKKPNLDHTLLENYRPVSLLPFMAKILEKVVFNQVLDFLTQNNLMDNKQSGFKKGHSTETALLSVVEDLRLAKADSKSSVLILLDLSAAFDTVNHQILLSTLESLGVAGTVIQWFRSYLSDRSFRVSWRGEVSNLQHLNTGVPQGSVLGPLLFSIYTSSLGPVIQRHGFSYHCYADDTQLYLSFHPDDPSVPARISACLLDISHWMKDHHLQLNLAKTEMLVVSANPTLHHNFSIQMDGATITASKMVKSLGVTIDDQLNFSDHISRTARSCRFALYNIRKIRPFLSEHAAQLLVQALVLSKLDYCNSLLALLPANSIKPLQLLQNAAARVVFNEPKRAHVTPLLVRLHWLPVAARIKFKTLMFAYKVTSGLAPSYLHSLLQIYVPSRNLRSVNERRLVVPSQRGKKSLSRTLTLNLPSWWNELPNCIRTAESLAIFKKRLKTQLFSLHFTS

SEQ ID NO: 17 - protein, 1341 aa, synthetic construct
MAPKKKRKVNTKYNKEFLLYLAGFVDGDGSIFARIKPSQRSKFKHKLHLVFAVYQKTQRRWFLDKLVDEIGVGYVLDSGSVSFYSLSEIKPLHNFLTQLQPFLKLKQKQANLVLKIIEQLPSAKESPDKFLEVCTWVDQIAALNDSKTRKTTSETVRAVLDSLPGSVGGLSPSQASSAASSASSSPGSGISEALRAGAGSGTGYNKEFLLYLAGFVDGDGSIYARIKPVQRAKFKHELVLGFDVTQKTQRRWFLDKLVDEIGVGYVYDKGSVSAYRLSQIKPLHNFLTQLQPFLKLKQKQANLVLKIIEQLPSAKESPDKFLEVCTWVDQIAALNDSKTRKTTSETVRAVLDSLSEKKKSSPSGSETPGTSESATPECFLIPVVTNTRKTREVRCKRNPHNLRSIHVSTISQLSLSVGLWNCQSAVNKADFITSIATYSDYNLMALTETWLRPEDTATHATLSANFSFSHTPRQTGRGGGTGLLISKEWKFTLIPSLPTISSFEFHAVTIIHPFYINVVVIYRPPGKLGHFLDELDVLLSSFSNFDTPLLVLGDFNIYVDKPQAADFQTLLASFDLKRAPTSATHKSGNQLDLIYTRHCFTDQTIVTPLQISAHFLLSLNIHITPEPPHTPTLVTFRRNLRSLSPNRLSTIVSDSLPPSRKLTALDSNSATNTLCSTLASCLDRLCPLASRPARASPPAPWLSDALREHRSKLRAAERIWRKTKNPAHLLTYQTLLSSFSAEVTSAKQTYYRLKINNATNPRLLFKTFSSLLYPPPPPASSTLTTDDFATFFCTKTAKISAQFAAPTTNTQDTTPTPHTLTSFSQLSESEVSKLVLSSHATTCPLDPIPSHLLQAISPAVIPTLTHIINTSLDSGLFPTTFKQARVTPLLKKPNLDHTLLENYRPVSLLPFMAKILEKVVFNQVLDFLTQNNLMDNKQSGFKKGHSTETALLSVVEDLRLAKADSKSSVLILLDLSAAFDTVNHQILLSTLESLGVAGTVIQWFRSYLSDRSFRVSWRGEVSNLQHLNTGVPQGSVLGPLLFSIYTSSLGPVIQRHGFSYHCYADDTQLYLSFHPDDPSVPARISACLLDISHWMKDHHLQLNLAKTEMLVVSANPTLHHNFSIQMDGATITASKMVKSLGVTIDDQLNFSDHISRTARSCRFALYNIRKIRPFLSEHAAQLLVQALVLSKLDYCNSLLALLPANSIKPLQLLQNAAARVVFNEPKRAHVTPLLVRLHWLPVAARIKFKTLMFAYKVTSGLAPSYLHSLLQIYVPSRNLRSVNERRLVVPSQRGKKSLSRTLTLNLPSWWNELPNCIRTAESLAIFKKRLKTQLFSLHFTS

SEQ ID NO: 18 - protein, 1092 aa, synthetic construct
MAPKKKRKVNTKYNKEFLLYLAGFVDGDGSIFARIKPSQRSKFKHKLHLVFAVYQKTQRRWFLDKLVDEIGVGYVLDSGSVSFYSLSEIKPLHNFLTQLQPFLKLKQKQANLVLKIIEQLPSAKESPDKFLEVCTWVDQIAALNDSKTRKTTSETVRAVLDSLPGSVGGLSPSQASSAASSASSSPGSGISEALRAGAGSGTGYNKEFLLYLAGFVDGDGSIYARIKPVQRAKFKHELVLGFDVTQKTQRRWFLDKLVDEIGVGYVYDKGSVSAYRLSQIKPLHNFLTQLQPFLKLKQKQANLVLKIIEQLPSAKESPDKFLEVCTWVDQIAALNDSKTRKTTSETVRAVLDSLSEKKKSSPSGSETPGTSESATPEPPHTPTLVTFRRNLRSLSPNRLSTIVSDSLPPSRKLTALDSNSATNTLCSTLASCLDRLCPLASRPARASPPAPWLSDALREHRSKLRAAERIWRKTKNPAHLLTYQTLLSSFSAEVTSAKQTYYRLKINNATNPRLLFKTFSSLLYPPPPPASSTLTTDDFATFFCTKTAKISAQFAAPTTNTQDTTPTPHTLTSFSQLSESEVSKLVLSSHATTCPLDPIPSHLLQAISPAVIPTLTHIINTSLDSGLFPTTFKQARVTPLLKKPNLDHTLLENYRPVSLLPFMAKILEKVVFNQVLDFLTQNNLMDNKQSGFKKGHSTETALLSVVEDLRLAKADSKSSVLILLDLSAAFDTVNHQILLSTLESLGVAGTVIQWFRSYLSDRSFRVSWRGEVSNLQHLNTGVPQGSVLGPLLFSIYTSSLGPVIQRHGFSYHCYADDTQLYLSFHPDDPSVPARISACLLDISHWMKDHHLQLNLAKTEMLVVSANPTLHHNFSIQMDGATITASKMVKSLGVTIDDQLNFSDHISRTARSCRFALYNIRKIRPFLSEHAAQLLVQALVLSKLDYCNSLLALLPANSIKPLQLLQNAAARVVFNEPKRAHVTPLLVRLHWLPVAARIKFKTLMFAYKVTSGLAPSYLHSLLQIYVPSRNLRSVNERRLVVPSQRGKKSLSRTLTLNLPSWWNELPNCIRTAESLAIFKKRLKTQLFSLHFTS

SEQ ID NO: 19 - protein, 1341 aa, synthetic construct
MAPKKKRKVNTKYNKEFLLYLAGFVDGDGSIFARIKPSQRSKFKHKLHLVFAVYEKTQRRWFLDKLVDEIGVGYVLDSGSVSFYSLSEIKPLHNFLTQLQPFLKLKQKQANLVLKIIEQLPSAKESPDKFLEVCTWVDQIAALNDSKTRKTTSETVRAVLDSLPGSVGGLSPSQASSAASSASSSPGSGISEALRAGAGSGTGYNKEFLLYLAGFVDGDGSIYARIKPVQRAKFKHELVLGFDVTQKTQRRWFLDKLVDEIGVGYVYDKGSVSAYRLSQIKPLHNFLTQLQPFLKLKQKQANLVLKIIEQLPSAKESPDKFLEVCTWVDQIAALNDSKTRKTTSETVRAVLDSLSEKKKSSPSGSETPGTSESATPECFLIPVVTNTRKTREVRCKRNPHNLRSIHVSTISQLSLSVGLWNCQSAVNKADFITSIATYSDYNLMALTETWLRPEDTATHATLSANFSFSHTPRQTGRGGGTGLLISKEWKFTLIPSLPTISSFEFHAVTIIHPFYINVVVIYRPPGKLGHFLDELDVLLSSFSNFDTPLLVLGDFNIYVDKPQAADFQTLLASFDLKRAPTSATHKSGNQLDLIYTRHCFTDQTIVTPLQISAHFLLSLNIHITPEPPHTPTLVTFRRNLRSLSPNRLSTIVSDSLPPSRKLTALDSNSATNTLCSTLASCLDRLCPLASRPARASPPAPWLSDALREHRSKLRAAERIWRKTKNPAHLLTYQTLLSSFSAEVTSAKQTYYRLKINNATNPRLLFKTFSSLLYPPPPPASSTLTTDDFATFFCTKTAKISAQFAAPTTNTQDTTPTPHTLTSFSQLSESEVSKLVLSSHATTCPLDPIPSHLLQAISPAVIPTLTHIINTSLDSGLFPTTFKQARVTPLLKKPNLDHTLLENYRPVSLLPFMAKILEKVVFNQVLDFLTQNNLMDNKQSGFKKGHSTETALLSVVEDLRLAKADSKSSVLILLDLSAAFDTVNHQILLSTLESLGVAGTVIQWFRSYLSDRSFRVSWRGEVSNLQHLNTGVPQGSVLGPLLFSIYTSSLGPVIQRHGFSYHCYADDTQLYLSFHPDDPSVPARISACLLDISHWMKDHHLQLNLAKTEMLVVSANPTLHHNFSIQMDGATITASKMVKSLGVTIDDQLNFSDHISRTARSCRFALYNIRKIRPFLSEHAAQLLVQALVLSKLDYCNSLLALLPANSIKPLQLLQNAAARVVFNEPKRAHVTPLLVRLHWLPVAARIKFKTLMFAYKVTSGLAPSYLHSLLQIYVPSRNLRSVNERRLVVPSQRGKKSLSRTLTLNLPSWWNELPNCIRTAESLAIFKKRLKTQLFSLHFTS

SEQ ID NO: 20 - protein, 1092 aa, synthetic construct
MAPKKKRKVNTKYNKEFLLYLAGFVDGDGSIFARIKPSQRSKFKHKLHLVFAVYEKTQRRWFLDKLVDEIGVGYVLDSGSVSFYSLSEIKPLHNFLTQLQPFLKLKQKQANLVLKIIEQLPSAKESPDKFLEVCTWVDQIAALNDSKTRKTTSETVRAVLDSLPGSVGGLSPSQASSAASSASSSPGSGISEALRAGAGSGTGYNKEFLLYLAGFVDGDGSIYARIKPVQRAKFKHELVLGFDVTQKTQRRWFLDKLVDEIGVGYVYDKGSVSAYRLSQIKPLHNFLTQLQPFLKLKQKQANLVLKIIEQLPSAKESPDKFLEVCTWVDQIAALNDSKTRKTTSETVRAVLDSLSEKKKSSPSGSETPGTSESATPEPPHTPTLVTFRRNLRSLSPNRLSTIVSDSLPPSRKLTALDSNSATNTLCSTLASCLDRLCPLASRPARASPPAPWLSDALREHRSKLRAAERIWRKTKNPAHLLTYQTLLSSFSAEVTSAKQTYYRLKINNATNPRLLFKTFSSLLYPPPPPASSTLTTDDFATFFCTKTAKISAQFAAPTTNTQDTTPTPHTLTSFSQLSESEVSKLVLSSHATTCPLDPIPSHLLQAISPAVIPTLTHIINTSLDSGLFPTTFKQARVTPLLKKPNLDHTLLENYRPVSLLPFMAKILEKVVFNQVLDFLTQNNLMDNKQSGFKKGHSTETALLSVVEDLRLAKADSKSSVLILLDLSAAFDTVNHQILLSTLESLGVAGTVIQWFRSYLSDRSFRVSWRGEVSNLQHLNTGVPQGSVLGPLLFSIYTSSLGPVIQRHGFSYHCYADDTQLYLSFHPDDPSVPARISACLLDISHWMKDHHLQLNLAKTEMLVVSANPTLHHNFSIQMDGATITASKMVKSLGVTIDDQLNFSDHISRTARSCRFALYNIRKIRPFLSEHAAQLLVQALVLSKLDYCNSLLALLPANSIKPLQLLQNAAARVVFNEPKRAHVTPLLVRLHWLPVAARIKFKTLMFAYKVTSGLAPSYLHSLLQIYVPSRNLRSVNERRLVVPSQRGKKSLSRTLTLNLPSWWNELPNCIRTAESLAIFKKRLKTQLFSLHFTS

SEQ ID NO: 21 - protein, 2134 aa, synthetic construct
MKRTADGSEFESPKKKRKVDKKYSIGLDIGTNSVGWAVITDEYKVPSKKFKVLGNTDRHSIKKNLIGALLFDSGETAEATRLKRTARRRYTRRKNRICYLQEIFSNEMAKVDDSFFHRLEESFLVEEDKKHERHPIFGNIVDEVAYHEKYPTIYHLRKKLVDSTDKADLRLIYLALAHMIKFRGHFLIEGDLNPDNSDVDKLFIQLVQTYNQLFEENPINASGVDAKAILSARLSKSRRLENLIAQLPGEKKNGLFGNLIALSLGLTPNFKSNFDLAEDAKLQLSKDTYDDDLDNLLAQIGDQYADLFLAAKNLSDAILLSDILRVNTEITKAPLSASMIKRYDEHHQDLTLLKALVRQQLPEKYKEIFFDQSKNGYAGYIDGGASQEEFYKFIKPILEKMDGTEELLVKLNREDLLRKQRTFDNGSIPHQIHLGELHAILRRQEDFYPFLKDNREKIEKILTFRIPYYVGPLARGNSRFAWMTRKSEETITPWNFEEVVDKGASAQSFIERMTNFDKNLPNEKVLPKHSLLYEYFTVYNELTKVKYVTEGMRKPAFLSGEQKKAIVDLLFKTNRKVTVKQLKEDYFKKIECFDSVEISGVEDRFNASLGTYHDLLKIIKDKDFLDNEENEDILEDIVLTLTLFEDREMIEERLKTYAHLFDDKVMKQLKRRRYTGWGRLSRKLINGIRDKQSGKTILDFLKSDGFANRNFMQLIHDDSLTFKEDIQKAQVSGQGDSLHEHIANLAGSPAIKKGILQTVKVVDELVKVMGRHKPENIVIEMARENQTTQKGQKNSRERMKRIEEGIKELGSQILKEHPVENTQLQNEKLYLYYLQNGRDMYVDQELDINRLSDYDVDAIVPQSFLKDDSIDNKVLTRSDKNRGKSDNVPSEEVVKKMKNYWRQLLNAKLITQRKFDNLTKAERGGLSELDKAGFIKRQLVETRQITKHVAQILDSRMNTKYDENDKLIREVKVITLKSKLVSDFRKDFQFYKVREINNYHHAHDAYLNAVVGTALIKKYPKLESEFVYGDYKVYDVRKMIAKSEQEIGKATAKYFFYSNIMNFFKTEITLANGEIRKRPLIETNGETGEIVWDKGRDFATVRKVLSMPQVNIVKKTEVQTGGFSKESILPKRNSDKLIARKKDWDPKKYGGFDSPTVAYSVLVVAKVEKGKSKKLKSVKELLGITIMERSSFEKNPIDFLEAKGYKEVKKDLIIKLPKYSLFELENGRKRMLASAGELQKGNELALPSKYVNFLYLASHYEKLKGSPEDNEQKQLFVEQHKHYLDEIIEQISEFSKRVILADANLDKVLSAYNKHRDKPIREQAENIIHLFTLTNLGAPAAFKYFDTTIDRKRYTSTKEVLDATLIHQSITGLYETRIDLSQLGGDSGGSSGGSSGSETPGTSESATPESSGGSSGGSSPPHTPTLVTFRRNLRSLSPNRLSTIVSDSLPPSRKLTALDSNSATNTLCSTLASCLDRLCPLASRPARASPPAPWLSDALREHRSKLRAAERIWRKTKNPAHLLTYQTLLSSFSAEVTSAKQTYYRLKINNATNPRLLFKTFSSLLYPPPPPASSTLTTDDFATFFCTKTAKISAQFAAPTTNTQDTTPTPHTLTSFSQLSESEVSKLVLSSHATTCPLDPIPSHLLQAISPAVIPTLTHIINTSLDSGLFPTTFKQARVTPLLKKPNLDHTLLENYRPVSLLPFMAKILEKVVFNQVLDFLTQNNLMDNKQSGFKKGHSTETALLSVVEDLRLAKADSKSSVLILLDLSAAFDTVNHQILLSTLESLGVAGTVIQWFRSYLSDRSFRVSWRGEVSNLQHLNTGVPQGSVLGPLLFSIYTSSLGPVIQRHGFSYHCYADDTQLYLSFHPDDPSVPARISACLLDISHWMKDHHLQLNLAKTEMLVVSANPTLHHNFSIQMDGATITASKMVKSLGVTIDDQLNFSDHISRTARSCRFALYNIRKIRPFLSEHAAQLLVQALVLSKLDYCNSLLALLPANSIKPLQLLQNAAARVVFNEPKRAHVTPLLVRLHWLPVAARIKFKTLMFAYKVTSGLAPSYLHSLLQIYVPSRNLRSVNERRLVVPSQRGKKSLSRTLTLNLPSWWNELPNCIRTAESLAIFKKRLKTQLFSLHFTS

SEQ ID NO: 22 - protein, 2134 aa, synthetic construct
MKRTADGSEFESPKKKRKVDKKYSIGLDIGTNSVGWAVITDEYKVPSKKFKVLGNTDRHSIKKNLIGALLFDSGETAEATRLKRTARRRYTRRKNRICYLQEIFSNEMAKVDDSFFHRLEESFLVEEDKKHERHPIFGNIVDEVAYHEKYPTIYHLRKKLVDSTDKADLRLIYLALAHMIKFRGHFLIEGDLNPDNSDVDKLFIQLVQTYNQLFEENPINASGVDAKAILSARLSKSRRLENLIAQLPGEKKNGLFGNLIALSLGLTPNFKSNFDLAEDAKLQLSKDTYDDDLDNLLAQIGDQYADLFLAAKNLSDAILLSDILRVNTEITKAPLSASMIKRYDEHHQDLTLLKALVRQQLPEKYKEIFFDQSKNGYAGYIDGGASQEEFYKFIKPILEKMDGTEELLVKLNREDLLRKQRTFDNGSIPHQIHLGELHAILRRQEDFYPFLKDNREKIEKILTFRIPYYVGPLARGNSRFAWMTRKSEETITPWNFEEVVDKGASAQSFIERMTNFDKNLPNEKVLPKHSLLYEYFTVYNELTKVKYVTEGMRKPAFLSGEQKKAIVDLLFKTNRKVTVKQLKEDYFKKIECFDSVEISGVEDRFNASLGTYHDLLKIIKDKDFLDNEENEDILEDIVLTLTLFEDREMIEERLKTYAHLFDDKVMKQLKRRRYTGWGRLSRKLINGIRDKQSGKTILDFLKSDGFANRNFMQLIHDDSLTFKEDIQKAQVSGQGDSLHEHIANLAGSPAIKKGILQTVKVVDELVKVMGRHKPENIVIEMARENQTTQKGQKNSRERMKRIEEGIKELGSQILKEHPVENTQLQNEKLYLYYLQNGRDMYVDQELDINRLSDYDVDHIVPQSFLKDDSIDNKVLTRSDKNRGKSDNVPSEEVVKKMKNYWRQLLNAKLITQRKFDNLTKAERGGLSELDKAGFIKRQLVETRQITKHVAQILDSRMNTKYDENDKLIREVKVITLKSKLVSDFRKDFQFYKVREINNYHHAHDAYLNAVVGTALIKKYPKLESEFVYGDYKVYDVRKMIAKSEQEIGKATAKYFFYSNIMNFFKTEITLANGEIRKRPLIETNGETGEIVWDKGRDFATVRKVLSMPQVNIVKKTEVQTGGFSKESILPKRNSDKLIARKKDWDPKKYGGFDSPTVAYSVLVVAKVEKGKSKKLKSVKELLGITIMERSSFEKNPIDFLEAKGYKEVKKDLIIKLPKYSLFELENGRKRMLASAGELQKGNELALPSKYVNFLYLASHYEKLKGSPEDNEQKQLFVEQHKHYLDEIIEQISEFSKRVILADANLDKVLSAYNKHRDKPIREQAENIIHLFTLTNLGAPAAFKYFDTTIDRKRYTSTKEVLDATLIHQSITGLYETRIDLSQLGGDSGGSSGGSSGSETPGTSESATPESSGGSSGGSSPPHTPTLVTFRRNLRSLSPNRLSTIVSDSLPPSRKLTALDSNSATNTLCSTLASCLDRLCPLASRPARASPPAPWLSDALREHRSKLRAAERIWRKTKNPAHLLTYQTLLSSFSAEVTSAKQTYYRLKINNATNPRLLFKTFSSLLYPPPPPASSTLTTDDFATFFCTKTAKISAQFAAPTTNTQDTTPTPHTLTSFSQLSESEVSKLVLSSHATTCPLDPIPSHLLQAISPAVIPTLTHIINTSLDSGLFPTTFKQARVTPLLKKPNLDHTLLENYRPVSLLPFMAKILEKVVFNQVLDFLTQNNLMDNKQSGFKKGHSTETALLSVVEDLRLAKADSKSSVLILLDLSAAFDTVNHQILLSTLESLGVAGTVIQWFRSYLSDRSFRVSWRGEVSNLQHLNTGVPQGSVLGPLLFSIYTSSLGPVIQRHGFSYHCYADDTQLYLSFHPDDPSVPARISACLLDISHWMKDHHLQLNLAKTEMLVVSANPTLHHNFSIQMDGATITASKMVKSLGVTIDDQLNFSDHISRTARSCRFALYNIRKIRPFLSEHAAQLLVQALVLSKLDYCNSLLALLPANSIKPLQLLQNAAARVVFNEPKRAHVTPLLVRLHWLPVAARIKFKTLMFAYKVTSGLAPSYLHSLLQIYVPSRNLRSVNERRLVVPSQRGKKSLSRTLTLNLPSWWNELPNCIRTAESLAIFKKRLKTQLFSLHFTS

SEQ ID NO: 23 - protein, 100 aa, Homo sapiens
MPKRKVSSAEGAAKEEPKRRSARLSAKPPAKVEAKPKKAAAKDKSSDKKVQTKGKRGAKGKQAEVANQETKEDLPAENGETKTEESPASDEAGEKEAKSD

SEQ ID NO: 24 - protein, 83 aa, Homo sapiens
GKGDPKKPRGKMSSYAFFVQTCREEHKKKHPDASVNFSEFSKKCSERWKTMSAKEKGKFEDMAKADKARYEREMKTYIPPKGE

SEQ ID NO: 25 - protein, 125 aa, synthetic construct
ESTVGPACPPGRTVTKRPWALAEDTPRGPDSPPKRPRPNSLPLTTTFRPLPPPPQTTSAVDPSSHSPVNPPRDQHATDTADEKPRAASPALSDASGPPTPDIPLSPGGTHARDPDADPDSPDLDS

SEQ ID NO: 26 - protein, 59 aa, Sulfolobus tokodaii
VTVKFKYKGEEKEVDISKIKKVWRVGKMISFTYDDNGKTGRGAVSEKDAPKELLQMLEK

SEQ ID NO: 27 - protein, 1011 aa, synthetic construct; identical to SEQ ID NO: 9

SEQ ID NO: 28 - DNA, 3555 bp, synthetic construct
  source 1..3555: mol_type = other DNA
tgcagggtcgactaatacgactcactatagggagagatatccctagctagttcaccgcggcagcggtcgcggcagcctcgtgtgaagaccgacgagggtaaagaccatcgactctacctgcgcgactccaccgagcaaagacaccgacaaagcacttgagtactttactttattgttttactttacacttattttttgttgtcagtgcacttttattatgtgttttctaattcctgttgttactaacactcgcaaaacacgggaggtacgctgcaagcgtaatcctcacaaccttcgttcaatacatgtatctactatttcacaactctctctctccgtgggcctctggaattgtcaatcagctgttaacaaggctgattttattacctccatagctacatattctgactataatctcatggctctaactgagacctggttgaggccggaggacactgctacacatgctactctttctgctaatttctctttttcccacactcctcgtcagacagggagagggggtgggactggactactaatttccaaagaatggaaatttactctgataccgtccctgccaacaatcagctcctttgaattccatgcagtcaccattatccaccccttctacataaatgtggttgtcatctaccgcccaccaggtaaattaggtcacttcctagatgaactggatgttcttctctcatctttttctaattttgacactcccttattggtgctaggtgacttcaacatttacgttgacaaaccgcaagctgcagactttcagactttgcttgcctcttttgacctaaaaagagcacctacttctgctacccacaaatcaggtaatcagctagaccttatttacacacgacactgcttcactgatcaaacaatagtaactccactacaaatatctgatcatttccttctgtctctcaacatccacattactcctgagccgccacacactcctacactggttacctttcgcagaaacctacgatctctctcacccaatagactatccaccattgtttcagactctcttcctccatctcgcaaactcactgcacttgattcgaacagtgccactaatacactctgctccacactagcatcatgtctagaccgattatgtcctcttgcatccaggccagcccgtgccagtcctcctgcaccctggctctcggatgctctccgtgagcatcgctcaaaacttcgggctgcggagagaatttggcggaaaactaaaaatcctgcacatctcttaacataccaaactcttctgtcctctttctcagctgaggttacttctgcaaagcagacgtattaccgtctgaaaatcaacaatgccactaatcctcgcctactttttaaaacattttcctccctcctatatcctcctcctccacccgcatcctccacacttactactgatgactttgctacattcttctgcaccaaaactgcaaaaatcagtgctcaatttgctgcacctacaacaaacacgcaagatacaacaccaacaccacacacactcacctctttttctcagctctctgagtctgaggtgtccaaacttgtgctatctagccatgcaaccacctgtccactcgatcccattccctctcatctcttgcaagccatctctcctgcagtcataccaacactgactcacataattaacacatctcttgactctggtttattccccactacatttaagcaggctagggtaaccccactgctaaagaaacccaacctggaccatacgctacttgaaaactacagaccagtatccctgcttccattcatggccaagattctggagaaagtagtgttcaatcaagtcctggactttcttactcaaaacaatctcatggacaacaagcaatccggctttaagaaaggccactcaactgagactgccctgctctcggtcgtggaggatctcagactggctaaagcagactctaaatcatcagtcctcattttgctggacttgtcagctgcttttgacactgtcaaccaccagatcctgctatctacgcttgagtcactgggcgttgcgggcactgttatacaatggtttagatcttacctctctgacaggtcattcagggtgtcttggaggggagaggtgtccaacctacagcatctaaacactggggtacctcaaggctctgttcttgggccacttctcttctccatctacacatcatctctaggaccagtcatccagagacatggattctcctaccactgctatgctgatgacacccagctatacctctcttttcatcctgatgatccctcggttccagctcgtatctcagcctgcctgttggatatttcacactggatgaaagatcatcatcttcagctgaacctcgcaaaaacggaaatgcttgtagtttctgccaacccgactctacaccataacttttcaatccagatggatggggcaaccattactgcatccaaaatggtgaaaagccttggagtaacgattgatgaccaactaaacttctctgaccacatttctagaactgctcgatcgtgcagatttgcactctataacatcagaaagatccgacccttcttatctgaacatgcagctcaactccttgttcaagctcttgttctctccaaactggattactgcaactctctactagctttgcttccagctaactctatcaagcctcttcaactgctccagaatgcagcagcacgagttgtcttcaatgaacctaaacgagcacatgtcactccgctgctagtccgtttgcactggctgccagttgctgctcgcatcaaattcaaaactctgatgtttgcctacaaagtgacttctggcctagcaccttcttatctgcactcacttctgcagatctatgtgccctccagaaacttgcgttctgtgaatgaacgtcgcctcgtggttccatcccaaagagggaaaaaatcactttcgcgaacgctcacgctcaatctgcccagttggtggaatgaactccctaactgcatcagaacagcagagtcactcgctattttcaagaaacgactaaaaactcaactatttagtctccacttcacttccggctctggaagcggcagcggctccaagaacagcacatctagaaatcctagcggcatcaacgacgattacggccagctgaagaacttcaagaagttcaagaaagtgacctacggctcccctaagaagaaaagaaaggtgtaagctgcaattgcctctttgaatatcacactaattgtacaaaaaaaaaaaaaaaaaaaaaaaaaactactaacacttcccttcttagactttacagaccgcggcctactcggatccgcgatgatgatcagacatgataagatacattgatgagtttggacaaaccacaactagaatgcagtgaaaaaaatgctttatttgtgaaatttgtgatgctattgctttatttgtaaccattataagctgcaataaacaagttaacaacaacaaaaaaaaaaaaaaaaaaaaatttaaatgcgcgcatc

SEQ ID NO: 29 - protein, 1116 aa, synthetic construct
MAPKKKRKVGRGCNTNMSVPTDGAVTTSQIPASEQETLVRPKPLLLKLLKSVGAQKDTYTMKEVLFYLGQYIMTKRLYDEKQQHIVYCSNDLLGDLFGVPSFSVKEHRKIYTMIYRNLVVVNQQESSDSGTSVSENSGSETPGTSESATPESCFLIPVVTNTRKTREVRCKRNPHNLRSIHVSTISQLSLSVGLWNCQSAVNKADFITSIATYSDYNLMALTETWLRPEDTATHATLSANFSFSHTPRQTGRGGGTGLLISKEWKFTLIPSLPTISSFEFHAVTIIHPFYINVVVIYRPPGKLGHFLDELDVLLSSFSNFDTPLLVLGDFNIYVDKPQAADFQTLLASFDLKRAPTSATHKSGNQLDLIYTRHCFTDQTIVTPLQISDHFLLSLNIHITPEPPHTPTLVTFRRNLRSLSPNRLSTIVSDSLPPSRKLTALDSNSATNTLCSTLASCLDRLCPLASRPARASPPAPWLSDALREHRSKLRAAERIWRKTKNPAHLLTYQTLLSSFSAEVTSAKQTYYRLKINNATNPRLLFKTFSSLLYPPPPPASSTLTTDDFATFFCTKTAKISAQFAAPTTNTQDTTPTPHTLTSFSQLSESEVSKLVLSSHATTCPLDPIPSHLLQAISPAVIPTLTHIINTSLDSGLFPTTFKQARVTPLLKKPNLDHTLLENYRPVSLLPFMAKILEKVVFNQVLDFLTQNNLMDNKQSGFKKGHSTETALLSVVEDLRLAKADSKSSVLILLDLSAAFDTVNHQILLSTLESLGVAGTVIQWFRSYLSDRSFRVSWRGEVSNLQHLNTGVPQGSVLGPLLFSIYTSSLGPVIQRHGFSYHCYADDTQLYLSFHPDDPSVPARISACLLDISHWMKDHHLQLNLAKTEMLVVSANPTLHHNFSIQMDGATITASKMVKSLGVTIDDQLNFSDHISRTARSCRFALYNIRKIRPFLSEHAAQLLVQALVLSKLDYCNSLLALLPANSIKPLQLLQNAAARVVFNEPKRAHVTPLLVRLHWLPVAARIKFKTLMFAYKVTSGLAPSYLHSLLQIYVPSRNLRSVNERRLVVPSQRGKKSLSRTLTLNLPSWWNELPNCIRTAESLAIFKKRLKTQLFSLHFTS

SEQ ID NO: 30 - DNA, 3697 bp, synthetic construct
  source 1..3697: mol_type = other DNA
tgcagggtcgactaatacgactcactataaggagagccgccaccatggcccctaagaaaaagagaaaggtgggaagaggctgtaataccaacatgagcgtgccaacagatggcgccgtgaccacatctcagatccccgcctctgaacaggagacactggtgcggcctaagcctctgctgctgaaactgctgaagtccgtgggcgctcagaaggacacctacaccatgaaagaagtgctgttctacctgggacagtacatcatgaccaagagactgtacgacgagaagcagcaacacatcgtgtactgcagcaacgacctgctcggcgatctgtttggcgtgcctagcttcagcgttaaggaacacagaaagatctacaccatgatctatagaaacctggtcgtggtgaaccagcaggagagcagcgacagcggcaccagcgtgtccgagaacagcggctctgagacacctggaacaagcgagagcgccaccccggaatcctgttttctaattcctgttgttactaacactcgcaaaacacgggaggtacgctgcaagcgtaatcctcacaaccttcgttcaatacatgtatctactatttcacaactctctctctccgtgggcctctggaattgtcaatcagctgttaacaaggctgattttattacctccatagctacatattctgactataatctcatggctctaactgagacctggttgaggccggaggacactgctacacatgctactctttctgctaatttctctttttcccacactcctcgtcagacagggagagggggtgggactggactactaatttccaaagaatggaaatttactctgataccgtccctgccaacaatcagctcctttgaattccatgcagtcaccattatccaccccttctacataaatgtggttgtcatctaccgcccaccaggtaaattaggtcacttcctagatgaactggatgttcttctctcatctttttctaattttgacactcccttattggtgctaggtgacttcaacatttacgttgacaaaccgcaagctgcagactttcagactttgcttgcctcttttgacctaaaaagagcacctacttctgctacccacaaatcaggtaatcagctagaccttatttacacacgacactgcttcactgatcaaacaatagtaactccactacaaatatctgatcatttccttctgtctctcaacatccacattactcctgagccgccacacactcctacactggttacctttcgcagaaacctacgatctctctcacccaatagactatccaccattgtttcagactctcttcctccatctcgcaaactcactgcacttgattcgaacagtgccactaatacactctgctccacactagcatcatgtctagaccgattatgtcctcttgcatccaggccagcccgtgccagtcctcctgcaccctggctctcggatgctctccgtgagcatcgctcaaaacttcgggctgcggagagaatttggcggaaaactaaaaatcctgcacatctcttaacataccaaactcttctgtcctctttctcagctgaggttacttctgcaaagcagacgtattaccgtctgaaaatcaacaatgccactaatcctcgcctactttttaaaacattttcctccctcctatatcctcctcctccacccgcatcctccacacttactactgatgactttgctacattcttctgcaccaaaactgcaaaaatcagtgctcaatttgctgcacctacaacaaacacgcaagatacaacaccaacaccacacacactcacctctttttctcagctctctgagtctgaggtgtccaaacttgtgctatctagccatgcaaccacctgtccactcgatcccattccctctcatctcttgcaagccatctctcctgcagtcataccaacactgactcacataattaacacatctcttgactctggtttattccccactacatttaagcaggctagggtaaccccactgctaaagaaacccaacctggaccatacgctacttgaaaactacagaccagtatccctgcttccattcatggccaagattctggagaaagtagtgttcaatcaagtcctggactttcttactcaaaacaatctcatggacaacaagcaatccggctttaagaaaggccactcaactgagactgccctgctctcggtcgtggaggatctcagactggctaaagcagactctaaatcatcagtcctcattttgctggacttgtcagctgcttttgacactgtcaaccaccagatcctgctatctacgcttgagtcactgggcgttgcgggcactgttatacaatggtttagatcttacctctctgacaggtcattcagggtgtcttggaggggagaggtgtccaacctacagcatctaaacactggggtacctcaaggctctgttcttgggccacttctcttctccatctacacatcatctctaggaccagtcatccagagacatggattctcctaccactgctatgctgatgacacccagctatacctctcttttcatcctgatgatccctcggttccagctcgtatctcagcctgcctgttggatatttcacactggatgaaagatcatcatcttcagctgaacctcgcaaaaacggaaatgcttgtagtttctgccaacccgactctacaccataacttttcaatccagatggatggggcaaccattactgcatccaaaatggtgaaaagccttggagtaacgattgatgaccaactaaacttctctgaccacatttctagaactgctcgatcgtgcagatttgcactctataacatcagaaagatccgacccttcttatctgaacatgcagctcaactccttgttcaagctcttgttctctccaaactggattactgcaactctctactagctttgcttccagctaactctatcaagcctcttcaactgctccagaatgcagcagcacgagttgtcttcaatgaacctaaacgagcacatgtcactccgctgctagtccgtttgcactggctgccagttgctgctcgcatcaaattcaaaactctgatgtttgcctacaaagtgacttctggcctagcaccttcttatctgcactcacttctgcagatctatgtgccctccagaaacttgcgttctgtgaatgaacgtcgcctcgtggttccatcccaaagagggaaaaaatcactttcgcgaacgctcacgctcaatctgcccagttggtggaatgaactccctaactgcatcagaacagcagagtcactcgctattttcaagaaacgactaaaaactcaactatttagtctccacttcacttcctaagctgcaattgcctctttgaatatcacactaattgtacaaaaaaaaaaaaaaaaaaaaaaaaaactactaacacttcccttcttagactttacagaccgcggcctactcggatccgcgatgatgatcagacatgataagatacattgatgagtttggacaaaccacaactagaatgcagtgaaaaaaatgctttatttgtgaaatttgtgatgctattgctttatttgtaaccattataagctgcaataaacaagttaacaacaacaaaaaaaaaaaaaaaaaaaaatttaaatgcgcgcatc

SEQ ID NO: 31 - protein, 1129 aa, synthetic construct
MCFLIPVVTNTRKTREVRCKRNPHNLRSIHVSTISQLSLSVGLWNCQSAVNKADFITSIATYSDYNLMALTETWLRPEDTATHATLSANFSFSHTPRQTGRGGGTGLLISKEWKFTLIPSLPTISSFEFHAVTIIHPFYINVVVIYRPPGKLGHFLDELDVLLSSFSNFDTPLLVLGDFNIYVDKPQAADFQTLLASFDLKRAPTSATHKSGNQLDLIYTRHCFTDQTIVTPLQISDHFLLSLNIHITPEPPHTPTLVTFRRNLRSLSPNRLSTIVSDSLPPSRKLTALDSNSATNTLCSTLASCLDRLCPLASRPARASPPAPWLSDALREHRSKLRAAERIWRKTKNPAHLLTYQTLLSSFSAEVTSAKQTYYRLKINNATNPRLLFKTFSSLLYPPPPPASSTLTTDDFATFFCTKTAKISAQFAAPTTNTQDTTPTPHTLTSFSQLSESEVSKLVLSSHATTCPLDPIPSHLLQAISPAVIPTLTHIINTSLDSGLFPTTFKQARVTPLLKKPNLDHTLLENYRPVSLLPFMAKILEKVVFNQVLDFLTQNNLMDNKQSGFKKGHSTETALLSVVEDLRLAKADSKSSVLILLDLSAAFDTVNHQILLSTLESLGVAGTVIQWFRSYLSDRSFRVSWRGEVSNLQHLNTGVPQGSVLGPLLFSIYTSSLGPVIQRHGFSYHCYADDTQLYLSFHPDDPSVPARISACLLDISHWMKDHHLQLNLAKTEMLVVSANPTLHHNFSIQMDGATITASKMVKSLGVTIDDQLNFSDHISRTARSCRFALYNIRKIRPFLSEHAAQLLVQALVLSKLDYCNSLLALLPANSIKPLQLLQNAAARVVFNEPKRAHVTPLLVRLHWLPVAARIKFKTLMFAYKVTSGLAPSYLHSLLQIYVPSRNLRSVNERRLVVPSQRGKKSLSRTLTLNLPSWWNELPNCIRTAESLAIFKKRLKTQLFSLHFTSSGSETPGTSESATPEGSESTVGPACPPGRTVTKRPWALAEDTPRGPDSPPKRPRPNSLPLTTTFRPLPPPPQTTSAVDPSSHSPVNPPRDQHATDTADEKPRAASPALSDASGPPTPDIPLSPGGTHARDPDADPDSPDLDSGGSGKRTADGSEFESPKKKRKV

SEQ ID NO: 32 - DNA, 6619 bp, synthetic construct
  source 1..6619: mol_type = other DNA
tcgcgcgtttcggtgatgacggtgaaaacctctgacacatgcagctcccggagacggtcacagcttgtctgtaagcggatgccgggagcagacaagcccgtcagggcgcgtcagcgggtgttggcgggtgtcggggctggcttaactatgcggcatcagagcagattgtactgagagtgcaccatatgcggtgtgaaataccgcacagatgcgtaaggagaaaataccgcatcaggcgccattcgccattcaggctgcgcaactgttgggaagggcgatcggtgcgggcctcttcgctattacgccagctggcgaaagggggatgtgctgcaaggcgattaagttgggtaacgccagggttttcccagtcacgacgttgtaaaacgacggccagtgaattggagatcggtacttcgcgaatgcgtcgagattgcagggtcgactaatacgactcactatagggagagatatccctagctagttcaccgcggcagcggtcgcggcagcctcgtgtgaagaccgacgagggtaaagaccatcgactctacctgcgcgactccaccgagcaaagacaccgacaaagcacttgagtactttactttattgttttactttacacttattttttgttgtcagtgcacttttattatgtgttttctaattcctgttgttactaacactcgcaaaacacgggaggtacgctgcaagcgtaatcctcacaaccttcgttcaatacatgtatctactatttcacaactctctctctccgtgggcctctggaattgtcaatcagctgttaacaaggctgattttattacctccatagctacatattctgactataatctcatggctctaactgagacctggttgaggccggaggacactgctacacatgctactctttctgctaatttctctttttcccacactcctcgtcagacagggagagggggtgggactggactactaatttccaaagaatggaaatttactctgataccgtccctgccaacaatcagctcctttgaattccatgcagtcaccattatccaccccttctacataaatgtggttgtcatctaccgcccaccaggtaaattaggtcacttcctagatgaactggatgttcttctctcatctttttctaattttgacactcccttattggtgctaggtgacttcaacatttacgttgacaaaccgcaagctgcagactttcagactttgcttgcctcttttgacctaaaaagagcacctacttctgctacccacaaatcaggtaatcagctagaccttatttacacacgacactgcttcactgatcaaacaatagtaactccactacaaatatctgatcatttccttctgtctctcaacatccacattactcctgagccgccacacactcctacactggttacctttcgcagaaacctacgatctctctcacccaatagactatccaccattgtttcagactctcttcctccatctcgcaaactcactgcacttgattcgaacagtgccactaatacactctgctccacactagcatcatgtctagaccgattatgtcctcttgcatccaggccagcccgtgccagtcctcctgcaccctggctctcggatgctctccgtgagcatcgctcaaaacttcgggctgcggagagaatttggcggaaaactaaaaatcctgcacatctcttaacataccaaactcttctgtcctctttctcagctgaggttacttctgcaaagcagacgtattaccgtctgaaaatcaacaatgccactaatcctcgcctactttttaaaacattttcctccctcctatatcctcctcctccacccgcatcctccacacttactactgatgactttgctacattcttctgcaccaaaactgcaaaaatcagtgctcaatttgctgcacctacaacaaacacgcaagatacaacaccaacaccacacacactcacctctttttctcagctctctgagtctgaggtgtccaaacttgtgctatctagccatgcaaccacctgtccactcgatcccattccctctcatctcttgcaagccatctctcctgcagtcataccaacactgactcacataattaacacatctcttgactctggtttattccccactacatttaagcaggctagggtaaccccactgctaaagaaacccaacctggaccatacgctacttgaaaactacagaccagtatccctgcttccattcatggccaagattctggagaaagtagtgttcaatcaagtcctggactttcttactcaaaacaatctcatggacaacaagcaatccggctttaagaaaggccactcaactgagactgccctgctctcggtcgtggaggatctcagactggctaaagcagactctaaatcatcagtcctcattttgctggacttgtcagctgcttttgacactgtcaaccaccagatcctgctatctacgcttgagtcactgggcgttgcgggcactgttatacaatggtttagatcttacctctctgacaggtcattcagggtgtcttggaggggagaggtgtccaacctacagcatctaaacactggggtacctcaaggctctgttcttgggccacttctcttctccatctacacatcatctctaggaccagtcatccagagacatggattctcctaccactgctatgctgatgacacccagctatacctctcttttcatcctgatgatccctcggttccagctcgtatctcagcctgcctgttggatatttcacactggatgaaagatcatcatcttcagctgaacctcgcaaaaacggaaatgcttgtagtttctgccaacccgactctacaccataacttttcaatccagatggatggggcaaccattactgcatccaaaatggtgaaaagccttggagtaacgattgatgaccaactaaacttctctgaccacatttctagaactgctcgatcgtgcagatttgcactctataacatcagaaagatccgacccttcttatctgaacatgcagctcaactccttgttcaagctcttgttctctccaaactggattactgcaactctctactagctttgcttccagctaactctatcaagcctcttcaactgctccagaatgcagcagcacgagttgtcttcaatgaacctaaacgagcacatgtcactccgctgctagtccgtttgcactggctgccagttgctgctcgcatcaaattcaaaactctgatgtttgcctacaaagtgacttctggcctagcaccttcttatctgcactcacttctgcagatctatgtgccctccagaaacttgcgttctgtgaatgaacgtcgcctcgtggttccatcccaaagagggaaaaaatcactttcgcgaacgctcacgctcaatctgcccagttggtggaatgaactccctaactgcatcagaacagcagagtcactcgctattttcaagaaacgactaaaaactcaactatttagtctccacttcacttcctccggctccgagactcctggaacaagcgagagcgctacacctgagggcagcgaaagcacagtcggccctgcttgccccccaggaagaaccgtgaccaagcggccctgggccctggccgaggacacccctaggggccccgatagcccccccaaaagaccccggcctaacagcctgcctctgaccacaacattcagacctctgcctcctccacctcagaccaccagcgccgtggaccctagcagccactcccctgtgaacccccctcgggaccagcacgccacagataccgccgacgagaagcccagagccgcttctccagccctgagcgacgccagcggacctcctacccctgacatccccctgtctcctggcggcacccacgccagagatcctgatgctgatcctgactctccagacctggacagcggcggatctggcaaaagaaccgctgatggcagcgagttcgagagccccaagaaaaagagaaaggtgtaagctgcaattgcctctttgaatatcacactaattgtacaaaaaaaaaaaaaaaaaaaaaaaaaactactaacacttcccttcttagactttacagaccgcggcctactcggatccgcgatgatgatcagacatgataagatacattgatgagtttggacaaaccacaactagaatgcagtgaaaaaaatgctttatttgtgaaatttgtgatgctattgctttatttgtaaccattataagctgcaataaacaagttaacaacaacaaaaaaaaaaaaaaaaaaaaatttaaatgcgcgcatcatcggatgccgggaccgacgagtgcagaggcgtgcaagcgagcttggcgtaatcatggtcatagctgtttcctgtgtgaaattgttatccgctcacaattccacacaacatacgagccggaagcataaagtgtaaagcctggggtgcctaatgagtgagctaactcacattaattgcgttgcgctcactgcccgctttccagtcgggaaacctgtcgtgccagctgcattaatgaatcggccaacgcgcggggagaggcggtttgcgtattgggcgctcttccgcttcctcgctcactgactcgctgcgctcggtcgttcggctgcggcgagcggtatcagctcactcaaaggcggtaatacggttatccacagaatcaggggataacgcaggaaagaacatgtgagcaaaaggccagcaaaaggccaggaaccgtaaaaaggccgcgttgctggcgtttttccataggctccgcccccctgacgagcatcacaaaaatcgacgctcaagtcagaggtggcgaaacccgacaggactataaagataccaggcgtttccccctggaagctccctcgtgcgctctcctgttccgaccctgccgcttaccggatacctgtccgcctttctcccttcgggaagcgtggcgctttctcatagctcacgctgtaggtatctcagttcggtgtaggtcgttcgctccaagctgggctgtgtgcacgaaccccccgttcagcccgaccgctgcgccttatccggtaactatcgtcttgagtccaacccggtaagacacgacttatcgccactggcagcagccactggtaacaggattagcagagcgaggtatgtaggcggtgctacagagttcttgaagtggtggcctaactacggctacactagaagaacagtatttggtatctgcgctctgctgaagccagttaccttcggaaaaagagttggtagctcttgatccggcaaacaaaccaccgctggtagcggtggtttttttgtttgcaagcagcagattacgcgcagaaaaaaaggatctcaagaagatcctttgatcttttctacggggtctgacgctcagtggaacgaaaactcacgttaagggattttggtcatgagattatcaaaaaggatcttcacctagatccttttaaattaaaaatgaagttttaaatcaatctaaagtatatatgagtaaacttggtctgacagttaccaatgcttaatcagtgaggcacctatctcagcgatctgtctatttcgttcatccatagttgcctgactccccgtcgtgtagataactacgatacgggagggcttaccatctggccccagtgctgcaatgataccgcgagacccacgctcaccggctccagatttatcagcaataaaccagccagccggaagggccgagcgcagaagtggtcctgcaactttatccgcctccatccagtctattaattgttgccgggaagctagagtaagtagttcgccagttaatagtttgcgcaacgttgttgccattgctacaggcatcgtggtgtcacgctcgtcgtttggtatggcttcattcagctccggttcccaacgatcaaggcgagttacatgatcccccatgttgtgcaaaaaagcggttagctccttcggtcctccgatcgttgtcagaagtaagttggccgcagtgttatcactcatggttatggcagcactgcataattctcttactgtcatgccatccgtaagatgcttttctgtgactggtgagtactcaaccaagtcattctgagaatagtgtatgcggcgaccgagttgctcttgcccggcgtcaatacgggataataccgcgccacatagcagaactttaaaagtgctcatcattggaaaacgttcttcggggcgaaaactctcaaggatcttaccgctgttgagatccagttcgatgtaacccactcgtgcacccaactgatcttcagcatcttttactttcaccagcgtttctgggtgagcaaaaacaggaaggcaaaatgccgcaaaaaagggaataagggcgacacggaaatgttgaatactcatactcttcctttttcaatattattgaagcatttatcagggttattgtctcatgagcggatacatatttgaatgtatttagaaaaataaacaaataggggttccgcgcacatttccccgaaaagtgccacctgacgtctaagaaaccattattatcatgacattaacctataaaaataggcgtatcacgaggccctttcgtc

SEQ ID NO: 33 - protein, 1129 aa, synthetic construct
MCFLIPVVTNTRKTREVRCKRNPHNLRSIHVSTISQLSLSVGLWNCQSAVNKADFITSIATYSDYNLMALTETWLRPEDTATHATLSANFSFSHTPRQTGRGGGTGLLISKEWKFTLIPSLPTISSFEFHAVTIIHPFYINVVVIYRPPGKLGHFLDELDVLLSSFSNFDTPLLVLGDFNIYVDKPQAADFQTLLASFDLKRAPTSATHKSGNQLDLIYTRHCFTDQTIVTPLQISDHFLLSLNIHITPEPPHTPTLVTFRRNLRSLSPNRLSTIVSDSLPPSRKLTALDSNSATNTLCSTLASCLDRLCPLASRPARASPPAPWLSDALREHRSKLRAAERIWRKTKNPAHLLTYQTLLSSFSAEVTSAKQTYYRLKINNATNPRLLFKTFSSLLYPPPPPASSTLTTDDFATFFCTKTAKISAQFAAPTTNTQDTTPTPHTLTSFSQLSESEVSKLVLSSHATTCPLDPIPSHLLQAISPAVIPTLTHIINTSLDSGLFPTTFKQARVTPLLKKPNLDHTLLENYRPVSLLPFMAKILEKVVFNQVLDFLTQNNLMDNKQSGFKKGHSTETALLSVVEDLRLAKADSKSSVLILLDLSAAFDTVNHQILLSTLESLGVAGTVIQWFRSYLSDRSFRVSWRGEVSKLQHLNTGVPQGSVLGPLLFSIYTSSLGPVIQRHGFSYHCYADDTQLYLSFHPDDPSVPARISACLLDISHWMKDHHLQLNLAKTEMLVVSANPTLHHNFSIQMDGATITASKMVKSLGVTIDDQLNFSDHISRTARSCRFALYNIRKIRPFLSEHAAQLLVQALVLSKLDYCNSLLALLPANSIKPLQLLQNAAARVVFNEPKRAHVTPLLVRLHWLPVAARIKFKTLMFAYKVTSGLAPSYLHSLLQIYVPSRNLRSVNERRLVVPSQRGKKSLSRTLTLNLPSWWNELPNCIRTAESLAIFKKRLKTQLFSLHFTSSGSETPGTSESATPEGSESTVGPACPPGRTVTKRPWALAEDTPRGPDSPPKRPRPNSLPLTTTFRPLPPPPQTTSAVDPSSHSPVNPPRDQHATDTADEKPRAASPALSDASGPPTPDIPLSPGGTHARDPDADPDSPDLDSGGSGKRTADGSEFESPKKKRKV

SEQ ID NO: 34 - DNA, 6619 bp, synthetic construct
  source 1..6619: mol_type = other DNA
tcgcgcgtttcggtgatgacggtgaaaacctctgacacatgcagctcccggagacggtcacagcttgtctgtaagcggatgccgggagcagacaagcccgtcagggcgcgtcagcgggtgttggcgggtgtcggggctggcttaactatgcggcatcagagcagattgtactgagagtgcaccatatgcggtgtgaaataccgcacagatgcgtaaggagaaaataccgcatcaggcgccattcgccattcaggctgcgcaactgttgggaagggcgatcggtgcgggcctcttcgctattacgccagctggcgaaagggggatgtgctgcaaggcgattaagttgggtaacgccagggttttcccagtcacgacgttgtaaaacgacggccagtgaattggagatcggtacttcgcgaatgcgtcgagattgcagggtcgactaatacgactcactataaggagagatatccctagctagttcaccgcggcagcggtcgcggcagcctcgtgtgaagaccgacgagggtaaagaccatcgactctacctgcgcgactccaccgagcaaagacaccgacaaagcacttgagtactttactttattgttttactttacacttattttttgttgtcagtgcacttttattatgtgttttctaattcctgttgttactaacactcgcaaaacacgggaggtacgctgcaagcgtaatcctcacaaccttcgttcaatacatgtatctactatttcacaactctctctctccgtgggcctctggaattgtcaatcagctgttaacaaggctgattttattacctccatagctacatattctgactataatctcatggctctaactgagacctggttgaggccggaggacactgctacacatgctactctttctgctaatttctctttttcccacactcctcgtcagacagggagagggggtgggactggactactaatttccaaagaatggaaatttactctgataccgtccctgccaacaatcagctcctttgaattccatgcagtcaccattatccaccccttctacataaatgtggttgtcatctaccgcccaccaggtaaattaggtcacttcctagatgaactggatgttcttctctcatctttttctaattttgacactcccttattggtgctaggtgacttcaacatttacgttgacaaaccgcaagctgcagactttcagactttgcttgcctcttttgacctaaaaagagcacctacttctgctacccacaaatcaggtaatcagctagaccttatttacacacgacactgcttcactgatcaaacaatagtaactccactacaaatatctgatcatttccttctgtctctcaacatccacattactcctgagccgccacacactcctacactggttacctttcgcagaaacctacgatctctctcacccaatagactatccaccattgtttcagactctcttcctccatctcgcaaactcactgcacttgattcgaacagtgccactaatacactctgctccacactagcatcatgtctagaccgattatgtcctcttgcatccaggccagcccgtgccagtcctcctgcaccctggctctcggatgctctccgtgagcatcgctcaaaacttcgggctgcggagagaatttggcggaaaactaaaaatcctgcacatctcttaacataccaaactcttctgtcctctttctcagctgaggttacttctgcaaagcagacgtattaccgtctgaaaatcaacaatgccactaatcctcgcctactttttaaaacattttcctccctcctatatcctcctcctccacccgcatcctccacacttactactgatgactttgctacattcttctgcaccaaaactgcaaaaatcagtgctcaatttgctgcacctacaacaaacacgcaagatacaacaccaacaccacacacactcacctctttttctcagctctctgagtctgaggtgtccaaacttgtgctatctagccatgcaaccacctgtccactcgatcccattccctctcatctcttgcaagccatctctcctgcagtcataccaacactgactcacataattaacacatctcttgactctggtttattccccactacatttaagcaggctagggtaaccccactgctaaagaaacccaacctggaccatacgctacttgaaaactacagaccagtatccctgcttccattcatggccaagattctggagaaagtagtgttcaatcaagtcctggactttcttactcaaaacaatctcatggacaacaagcaatccggctttaagaaaggccactcaactgagactgccctgctctcggtcgtggaggatctcagactggctaaagcagactctaaatcatcagtcctcattttgctggacttgtcagctgcttttgacactgtcaaccaccagatcctgctatctacgcttgagtcactgggcgttgcgggcactgttatacaatggtttagatcttacctctctgacaggtcattcagggtgtcttggaggggagaggtgtccaagctacagcatctaaacactggggtacctcaaggctctgttcttgggccacttctcttctccatctacacatcatctctaggaccagtcatccagagacatggattctcctaccactgctatgctgatgacacccagctatacctctcttttcatcctgatgatccctcggttccagctcgtatctcagcctgcctgttggatatttcacactggatgaaagatcatcatcttcagctgaacctcgcaaaaacggaaatgcttgtagtttctgccaacccgactctacaccataacttttcaatccagatggatggggcaaccattactgcatccaaaatggtgaaaagccttggagtaacgattgatgaccaactaaacttctctgaccacatttctagaactgctcgatcgtgcagatttgcactctataacatcagaaagatccgacccttcttatctgaacatgcagctcaactccttgttcaagctcttgttctctccaaactggattactgcaactctctactagctttgcttccagctaactctatcaagcctcttcaactgctccagaatgcagcagcacgagttgtcttcaatgaacctaaacgagcacatgtcactccgctgctagtccgtttgcactggctgccagttgctgctcgcatcaaattcaaaactctgatgtttgcctacaaagtgacttctggcctagcaccttcttatctgcactcacttctgcagatctatgtgccctccagaaacttgcgttctgtgaatgaacgtcgcctcgtggttccatcccaaagagggaaaaaatcactttcgcgaacgctcacgctcaatctgcccagttggtggaatgaactccctaactgcatcagaacagcagagtcactcgctattttcaagaaacgactaaaaactcaactatttagtctccacttcacttcctccggctccgagactcctggaacaagcgagagcgctacacctgagggcagcgaaagcacagtcggccctgcttgccccccaggaagaaccgtgaccaagcggccctgggccctggccgaggacacccctaggggccccgatagcccccccaaaagaccccggcctaacagcctgcctctgaccacaacattcagacctctgcctcctccacctcagaccaccagcgccgtggaccctagcagccactcccctgtgaacccccctcgggaccagcacgccacagataccgccgacgagaagcccagagccgcttctccagccctgagcgacgccagcggacctcctacccctgacatccccctgtctcctggcggcacccacgccagagatcctgatgctgatcctgactctccagacctggacagcggcggatctggcaaaagaaccgctgatggcagcgagttcgagagccccaagaaaaagagaaaggtgtaagctgcaattgcctctttgaatatcacactaattgtacaaaaaaaaaaaaaaaaaaaaaaaaaactactaacacttcccttcttagactttacagaccgcggcctactcggatccgcgatgatgatcagacatgataagatacattgatgagtttggacaaaccacaactagaatgcagtgaaaaaaatgctttatttgtgaaatttgtgatgctattgctttatttgtaaccattataagctgcaataaacaagttaacaacaacaaaaaaaaaaaaaaaaaaaaatttaaatgcgcgcatcatcggatgccgggaccgacgagtgcagaggcgtgcaagcgagcttggcgtaatcatggtcatagctgtttcctgtgtgaaattgttatccgctcacaattccacacaacatacgagccggaagcataaagtgtaaagcctggggtgcctaatgagtgagctaactcacattaattgcgttgcgctcactgcccgctttccagtcgggaaacctgtcgtgccagctgcattaatgaatcggccaacgcgcggggagaggcggtttgcgtattgggcgctcttccgcttcctcgctcactgactcgctgcgctcggtcgttcggctgcggcgagcggtatcagctcactcaaaggcggtaatacggttatccacagaatcaggggataacgcaggaaagaacatgtgagcaaaaggccagcaaaaggccaggaaccgtaaaaaggccgcgttgctggcgtttttccataggctccgcccccctgacgagcatcacaaaaatcgacgctcaagtcagaggtggcgaaacccgacaggactataaagataccaggcgtttccccctggaagctccctcgtgcgctctcctgttccgaccctgccgcttaccggatacctgtccgcctttctcccttcgggaagcgtggcgctttctcatagctcacgctgtaggtatctcagttcggtgtaggtcgttcgctccaagctgggctgtgtgcacgaaccccccgttcagcccgaccgctgcgccttatccggtaactatcgtcttgagtccaacccggtaagacacgacttatcgccactggcagcagccactggtaacaggattagcagagcgaggtatgtaggcggtgctacagagttcttgaagtggtggcctaactacggctacactagaagaacagtatttggtatctgcgctctgctgaagccagttaccttcggaaaaagagttggtagctcttgatccggcaaacaaaccaccgctggtagcggtggtttttttgtttgcaagcagcagattacgcgcagaaaaaaaggatctcaagaagatcctttgatcttttctacggggtctgacgctcagtggaacgaaaactcacgttaagggattttggtcatgagattatcaaaaaggatcttcacctagatccttttaaattaaaaatgaagttttaaatcaatctaaagtatatatgagtaaacttggtctgacagttaccaatgcttaatcagtgaggcacctatctcagcgatctgtctatttcgttcatccatagttgcctgactccccgtcgtgtagataactacgatacgggagggcttaccatctggccccagtgctgcaatgataccgcgagacccacgctcaccggctccagatttatcagcaataaaccagccagccggaagggccgagcgcagaagtggtcctgcaactttatccgcctccatccagtctattaattgttgccgggaagctagagtaagtagttcgccagttaatagtttgcgcaacgttgttgccattgctacaggcatcgtggtgtcacgctcgtcgtttggtatggcttcattcagctccggttcccaacgatcaaggcgagttacatgatcccccatgttgtgcaaaaaagcggttagctccttcggtcctccgatcgttgtcagaagtaagttggccgcagtgttatcactcatggttatggcagcactgcataattctcttactgtcatgccatccgtaagatgcttttctgtgactggtgagtactcaaccaagtcattctgagaatagtgtatgcggcgaccgagttgctcttgcccggcgtcaatacgggataataccgcgccacatagcagaactttaaaagtgctcatcattggaaaacgttcttcggggcgaaaactctcaaggatcttaccgctgttgagatccagttcgatgtaacccactcgtgcacccaactgatcttcagcatcttttactttcaccagcgtttctgggtgagcaaaaacaggaaggcaaaatgccgcaaaaaagggaataagggcgacacggaaatgttgaatactcatactcttcctttttcaatattattgaagcatttatcagggttattgtctcatgagcggatacatatttgaatgtatttagaaaaataaacaaataggggttccgcgcacatttccccgaaaagtgccacctgacgtctaagaaaccattattatcatgacattaacctataaaaataggcgtatcacgaggccctttcgtc

SEQ ID NO: 35 - protein, 1205 aa, synthetic construct
MCFLIPVVTNTRKTREVRCKRNPHNLRSIHVSTISQLSLSVGLWNCQSAVNKADFITSIATYSDYNLMALTETWLRPEDTATHATLSANFSFSHTPRQTGRGGGTGLLISKEWKFTLIPSLPTISSFEFHAVTIIHPFYINVVVIYRPPGKLGHFLDELDVLLSSFSNFDTPLLVLGDFNIYVDKPQAADFQTLLASFDLKRAPTSATHKSGNQLDLIYTRHCFTDQTIVTPLQISDHFLLSLNIHITPEPPHTPTLVTFRRNLRSLSPNRLSTIVSDSLPPSRKLTALDSNSATNTLCSTLASCLDRLCPLASRPARASPPAPWLSDALREHRSKLRAAERIWRKTKNPAHLLTYQTLLSSFSAEVTSAKQTYYRLKINNATNPRLLFKTFSSLLYPPPPPASSTLTTDDFATFFCTKTAKISAQFAAPTTNTQDTTPTPHTLTSFSQLSESEVSKLVLSSHATTCPLDPIPSHLLQAISPAVIPTLTHIINTSLDSGLFPTTFKQARVTPLLKKPNLDHTLLENYRPVSLLPFMAKILEKVVFNQVLDFLTQNNLMDNKQSGFKKGHSTETALLSVVEDLRLAKADSKSSVLILLDLSAAFDTVNHQILLSTLESLGVAGTVIQWFRSYLSDRSFRVSWRGEVSNLQHLNTGVPQGSVLGPLLFSIYTSSLGPVIQRHGFSYHCYADDTQLYLSFHPDDPSVPARISACLLDISHWMKDHHLQLNLAKTEMLVVSANPTLHHNFSIQMDGATITASKMVKSLGVTIDDQLNFSDHISRTARSCRFALYNIRKIRPFLSEHAAQLLVQALVLSKLDYCNSLLALLPANSIKPLQLLQNAAARVVFNEPKRAHVTPLLVRLHWLPVAARIKFKTLMFAYKVTSGLAPSYLHSLLQIYVPSRNLRSVNERRLVVPSQRGKKSLSRTLTLNLPSWWNELPNCIRTAESLAIFKKRLKTQLFSLHFTSSGSETPGTSESATPEGSVTVKFKYKGEEKEVDISKIKKVWRVGKMISFTYDDNGKTGRGAVSEKDAPKELLQMLEKSGSETPGTSESATPEGSESTVGPACPPGRTVTKRPWALAEDTPRGPDSPPKRPRPNSLPLTTTFRPLPPPPQTTSAVDPSSHSPVNPPRDQHATDTADEKPRAASPALSDASGPPTPDIPLSPGGTHARDPDADPDSPDLDSGGSGKRTADGSEFESPKKKRKV

SEQ ID NO: 36 - DNA, 6847 bp, synthetic construct
  source 1..6847: mol_type = other DNA
tcgcgcgtttcggtgatgacggtgaaaacctctgacacatgcagctcccggagacggtcacagcttgtctgtaagcggatgccgggagcagacaagcccgtcagggcgcgtcagcgggtgttggcgggtgtcggggctggcttaactatgcggcatcagagcagattgtactgagagtgcaccatatgcggtgtgaaataccgcacagatgcgtaaggagaaaataccgcatcaggcgccattcgccattcaggctgcgcaactgttgggaagggcgatcggtgcgggcctcttcgctattacgccagctggcgaaagggggatgtgctgcaaggcgattaagttgggtaacgccagggttttcccagtcacgacgttgtaaaacgacggccagtgaattggagatcggtacttcgcgaatgcgtcgagattgcagggtcgactaatacgactcactatagggagagatatccctagctagttcaccgcggcagcggtcgcggcagcctcgtgtgaagaccgacgagggtaaagaccatcgactctacctgcgcgactccaccgagcaaagacaccgacaaagcacttgagtactttactttattgttttactttacacttattttttgttgtcagtgcacttttattatgtgttttctaattcctgttgttactaacactcgcaaaacacgggaggtacgctgcaagcgtaatcctcacaaccttcgttcaatacatgtatctactatttcacaactctctctctccgtgggcctctggaattgtcaatcagctgttaacaaggctgattttattacctccatagctacatattctgactataatctcatggctctaactgagacctggttgaggccggaggacactgctacacatgctactctttctgctaatttctctttttcccacactcctcgtcagacagggagagggggtgggactggactactaatttccaaagaatggaaatttactctgataccgtccctgccaacaatcagctcctttgaattccatgcagtcaccattatccaccccttctacataaatgtggttgtcatctaccgcccaccaggtaaattaggtcacttcctagatgaactggatgttcttctctcatctttttctaattttgacactcccttattggtgctaggtgacttcaacatttacgttgacaaaccgcaagctgcagactttcagactttgcttgcctcttttgacctaaaaagagcacctacttctgctacccacaaatcaggtaatcagctagaccttatttacacacgacactgcttcactgatcaaacaatagtaactccactacaaatatctgatcatttccttctgtctctcaacatccacattactcctgagccgccacacactcctacactggttacctttcgcagaaacctacgatctctctcacccaatagactatccaccattgtttcagactctcttcctccatctcgcaaactcactgcacttgattcgaacagtgccactaatacactctgctccacactagcatcatgtctagaccgattatgtcctcttgcatccaggccagcccgtgccagtcctcctgcaccctggctctcggatgctctccgtgagcatcgctcaaaacttcgggctgcggagagaatttggcggaaaactaaaaatcctgcacatctcttaacataccaaactcttctgtcctctttctcagctgaggttacttctgcaaagcagacgtattaccgtctgaaaatcaacaatgccactaatcctcgcctactttttaaaacattttcctccctcctatatcctcctcctccacccgcatcctccacacttactactgatgactttgctacattcttctgcaccaaaactgcaaaaatcagtgctcaatttgctgcacctacaacaaacacgcaagatacaacaccaacaccacacacactcacctctttttctcagctctctgagtctgaggtgtccaaacttgtgctatctagccatgcaaccacctgtccactcgatcccattccctctcatctcttgcaagccatctctcctgcagtcataccaacactgactcacataattaacacatctcttgactctggtttattccccactacatttaagcaggctagggtaaccccactgctaaagaaacccaacctggaccatacgctacttgaaaactacagaccagtatccctgcttccattcatggccaagattctggagaaagtagtgttcaatcaagtcctggactttcttactcaaaacaatctcatggacaacaagcaatccggctttaagaaaggccactcaactgagactgccctgctctcggtcgtggaggatctcagactggctaaagcagactctaaatcatcagtcctcattttgctggacttgtcagctgcttttgacactgtcaaccaccagatcctgctatctacgcttgagtcactgggcgttgcgggcactgttatacaatggtttagatcttacctctctgacaggtcattcagggtgtcttggaggggagaggtgtccaacctacagcatctaaacactggggtacctcaaggctctgttcttgggccacttctcttctccatctacacatcatctctaggaccagtcatccagagacatggattctcctaccactgctatgctgatgacacccagctatacctctcttttcatcctgatgatccctcggttccagctcgtatctcagcctgcctgttggatatttcacactggatgaaagatcatcatcttcagctgaacctcgcaaaaacggaaatgcttgtagtttctgccaacccgactctacaccataacttttcaatccagatggatggggcaaccattactgcatccaaaatggtgaaaagccttggagtaacgattgatgaccaactaaacttctctgaccacatttctagaactgctcgatcgtgcagatttgcactctataacatcagaaagatccgacccttcttatctgaacatgcagctcaactccttgttcaagctcttgttctctccaaactggattactgcaactctctactagctttgcttccagctaactctatcaagcctcttcaactgctccagaatgcagcagcacgagttgtcttcaatgaacctaaacgagcacatgtcactccgctgctagtccgtttgcactggctgccagttgctgctcgcatcaaattcaaaactctgatgtttgcctacaaagtgacttctggcctagcaccttcttatctgcactcacttctgcagatctatgtgccctccagaaacttgcgttctgtgaatgaacgtcgcctcgtggttccatcccaaagagggaaaaaatcactttcgcgaacgctcacgctcaatctgcccagttggtggaatgaactccctaactgcatcagaacagcagagtcactcgctattttcaagaaacgactaaaaactcaactatttagtctccacttcacttcctccggctccgagactcctggaacaagcgagagcgctacacctgagggcagcgtgaccgtgaagttcaagtacaagggcgaggaaaaggaagtggacatcagcaagatcaagaaggtctggcgggtgggcaagatgatcagctttacctacgacgataacggcaagacaggcagaggcgccgtgtccgagaaggacgcccctaaagagctgctgcagatgctggaaaaatccggctccgagactcctggaacaagcgagagcgctacacctgagggcagcgaaagcacagtcggccctgcttgccccccaggaagaaccgtgaccaagcggccctgggccctggccgaggacacccctaggggccccgatagcccccccaaaagaccccggcctaacagcctgcctctgaccacaacattcagacctctgcctcctccacctcagaccaccagcgccgtggaccctagcagccactcccctgtgaacccccctcgggaccagcacgccacagataccgccgacgagaagcccagagccgcttctccagccctgagcgacgccagcggacctcctacccctgacatccccctgtctcctggcggcacccacgccagagatcctgatgctgatcctgactctccagacctggacagcggcggatctggcaaaagaaccgctgatggcagcgagttcgagagccccaagaaaaagagaaaggtgtaagctgcaattgcctctttgaatatcacactaattgtacaaaaaaaaaaaaaaaaaaaaaaaaaactactaacacttcccttcttagactttacagaccgcggcctactcggatccgcgatgatgatcagacatgataagatacattgatgagtttggacaaaccacaactagaatgcagtgaaaaaaatgctttatttgtgaaatttgtgatgctattgctttatttgtaaccattataagctgcaataaacaagttaacaacaacaaaaaaaaaaaaaaaaaaaaatttaaatgcgcgcatcatcggatgccgggaccgacgagtgcagaggcgtgcaagcgagcttggcgtaatcatggtcatagctgtttcctgtgtgaaattgttatccgctcacaattccacacaacatacgagccggaagcataaagtgtaaagcctggggtgcctaatgagtgagctaactcacattaattgcgttgcgctcactgcccgctttccagtcgggaaacctgtcgtgccagctgcattaatgaatcggccaacgcgcggggagaggcggtttgcgtattgggcgctcttccgcttcctcgctcactgactcgctgcgctcggtcgttcggctgcggcgagcggtatcagctcactcaaaggcggtaatacggttatccacagaatcaggggataacgcaggaaagaacatgtgagcaaaaggccagcaaaaggccaggaaccgtaaaaaggccgcgttgctggcgtttttccataggctccgcccccctgacgagcatcacaaaaatcgacgctcaagtcagaggtggcgaaacccgacaggactataaagataccaggcgtttccccctggaagctccctcgtgcgctctcctgttccgaccctgccgcttaccggatacctgtccgcctttctcccttcgggaagcgtggcgctttctcatagctcacgctgtaggtatctcagttcggtgtaggtcgttcgctccaagctgggctgtgtgcacgaaccccccgttcagcccgaccgctgcgccttatccggtaactatcgtcttgagtccaacccggtaagacacgacttatcgccactggcagcagccactggtaacaggattagcagagcgaggtatgtaggcggtgctacagagttcttgaagtggtggcctaactacggctacactagaagaacagtatttggtatctgcgctctgctgaagccagttaccttcggaaaaagagttggtagctcttgatccggcaaacaaaccaccgctggtagcggtggtttttttgtttgcaagcagcagattacgcgcagaaaaaaaggatctcaagaagatcctttgatcttttctacggggtctgacgctcagtggaacgaaaactcacgttaagggattttggtcatgagattatcaaaaaggatcttcacctagatccttttaaattaaaaatgaagttttaaatcaatctaaagtatatatgagtaaacttggtctgacagttaccaatgcttaatcagtgaggcacctatctcagcgatctgtctatttcgttcatccatagttgcctgactccccgtcgtgtagataactacgatacgggagggcttaccatctggccccagtgctgcaatgataccgcgagacccacgctcaccggctccagatttatcagcaataaaccagccagccggaagggccgagcgcagaagtggtcctgcaactttatccgcctccatccagtctattaattgttgccgggaagctagagtaagtagttcgccagttaatagtttgcgcaacgttgttgccattgctacaggcatcgtggtgtcacgctcgtcgtttggtatggcttcattcagctccggttcccaacgatcaaggcgagttacatgatcccccatgttgtgcaaaaaagcggttagctccttcggtcctccgatcgttgtcagaagtaagttggccgcagtgttatcactcatggttatggcagcactgcataattctcttactgtcatgccatccgtaagatgcttttctgtgactggtgagtactcaaccaagtcattctgagaatagtgtatgcggcgaccgagttgctcttgcccggcgtcaatacgggataataccgcgccacatagcagaactttaaaagtgctcatcattggaaaacgttcttcggggcgaaaactctcaaggatcttaccgctgttgagatccagttcgatgtaacccactcgtgcacccaactgatcttcagcatcttttactttcaccagcgtttctgggtgagcaaaaacaggaaggcaaaatgccgcaaaaaagggaataagggcgacacggaaatgttgaatactcatactcttcctttttcaatattattgaagcatttatcagggttattgtctcatgagcggatacatatttgaatgtatttagaaaaataaacaaataggggttccgcgcacatttccccgaaaagtgccacctgacgtctaagaaaccattattatcatgacattaacctataaaaataggcgtatcacgaggccctttcgtc

SEQ ID NO: 37 - protein, 1037 aa, synthetic construct
MCFLIPVVTNTRKTREVRCKRNPHNLRSIHVSTISQLSLSVGLWNCQSAVNKADFITSIATYSDYNLMALTETWLRPEDTATHATLSANFSFSHTPRQTGRGGGTGLLISKEWKFTLIPSLPTISSFEFHAVTIIHPFYINVVVIYRPPGKLGHFLDELDVLLSSFSNFDTPLLVLGDFNIYVDKPQAADFQTLLASFDLKRAPTSATHKSGNQLDLIYTRHCFTDQTIVTPLQISDHFLLSLNIHITPEPPHTPTLVTFRRNLRSLSPNRLSTIVSDSLPPSRKLTALDSNSATNTLCSTLASCLDRLCPLASRPARASPPAPWLSDALREHRSKLRAAERIWRKTKNPAHLLTYQTLLSSFSAEVTSAKQTYYRLKINNATNPRLLFKTFSSLLYPPPPPASSTLTTDDFATFFCTKTAKISAQFAAPTTNTQDTTPTPHTLTSFSQLSESEVSKLVLSSHATTCPLDPIPSHLLQAISPAVIPTLTHIINTSLDSGLFPTTFKQARVTPLLKKPNLDHTLLENYRPVSLLPFMAKILEKVVFNQVLDFLTQNNLMDNKQSGFKKGHSTETALLSVVEDLRLAKADSKSSVLILLDLSAAFDTVNHQILLSTLESLGVAGTVIQWFRSYLSDRSFRVSWRGEVSNLQHLNTGVPQGSVLGPLLFSIYTSSLGPVIQRHGFSYHCYADDTQLYLSFHPDDPSVPARISACLLDISHWMKDHHLQLNLAKTEMLVVSANPTLHHNFSIQMDGATITASKMVKSLGVTIDDQLNFSDHISRTARSCRFALYNIRKIRPFLSEHAAQLLVQALVLSKLDYCNSLLALLPANSIKPLQLLQNAAARVVFNEPKRAHVTPLLVRLHWLPVAARIKFKTLMFAYKVTSGLAPSYLHSLLQIYVPSRNLRSVNERRLVVPSQRGKKSLSRTLTLNLPSWWNELPNCIRTAESLAIFKKRLKTQLFSLHFTSSGSETPGTSESATPEGSPTLLGFHTASGKKVKIAKESLDKVKNLFDEKEQGGSGKRTADGSEFESPKKKRKV

SEQ ID NO: 38 - DNA, 6343 bp, synthetic construct
  source 1..6343: mol_type = other DNA
tcgcgcgtttcggtgatgacggtgaaaacctctgacacatgcagctcccggagacggtcacagcttgtctgtaagcggatgccgggagcagacaagcccgtcagggcgcgtcagcgggtgttggcgggtgtcggggctggcttaactatgcggcatcagagcagattgtactgagagtgcaccatatgcggtgtgaaataccgcacagatgcgtaaggagaaaataccgcatcaggcgccattcgccattcaggctgcgcaactgttgggaagggcgatcggtgcgggcctcttcgctattacgccagctggcgaaagggggatgtgctgcaaggcgattaagttgggtaacgccagggttttcccagtcacgacgttgtaaaacgacggccagtgaattggagatcggtacttcgcgaatgcgtcgagattgcagggtcgactaatacgactcactatagggagagatatccctagctagttcaccgcggcagcggtcgcggcagcctcgtgtgaagaccgacgagggtaaagaccatcgactctacctgcgcgactccaccgagcaaagacaccgacaaagcacttgagtactttactttattgttttactttacacttattttttgttgtcagtgcacttttattatgtgttttctaattcctgttgttactaacactcgcaaaacacgggaggtacgctgcaagcgtaatcctcacaaccttcgttcaatacatgtatctactatttcacaactctctctctccgtgggcctctggaattgtcaatcagctgttaacaaggctgattttattacctccatagctacatattctgactataatctcatggctctaactgagacctggttgaggccggaggacactgctacacatgctactctttctgctaatttctctttttcccacactcctcgtcagacagggagagggggtgggactggactactaatttccaaagaatggaaatttactctgataccgtccctgccaacaatcagctcctttgaattccatgcagtcaccattatccaccccttctacataaatgtggttgtcatctaccgcccaccaggtaaattaggtcacttcctagatgaactggatgttcttctctcatctttttctaattttgacactcccttattggtgctaggtgacttcaacatttacgttgacaaaccgcaagctgcagactttcagactttgcttgcctcttttgacctaaaaagagcacctacttctgctacccacaaatcaggtaatcagctagaccttatttacacacgacactgcttcactgatcaaacaatagtaactccactacaaatatctgatcatttccttctgtctctcaacatccacattactcctgagccgccacacactcctacactggttacctttcgcagaaacctacgatctctctcacccaatagactatccaccattgtttcagactctcttcctccatctcgcaaactcactgcacttgattcgaacagtgccactaatacactctgctccacactagcatcatgtctagaccgattatgtcctcttgcatccaggccagcccgtgccagtcctcctgcaccctggctctcggatgctctccgtgagcatcgctcaaaacttcgggctgcggagagaatttggcggaaaactaaaaatcctgcacatctcttaacataccaaactcttctgtcctctttctcagctgaggttacttctgcaaagcagacgtattaccgtctgaaaatcaacaatgccactaatcctcgcctactttttaaaacattttcctccctcctatatcctcctcctccacccgcatcctccacacttactactgatgactttgctacattcttctgcaccaaaactgcaaaaatcagtgctcaatttgctgcacctacaacaaacacgcaagatacaacaccaacaccacacacactcacctctttttctcagctctctgagtctgaggtgtccaaacttgtgctatctagccatgcaaccacctgtccactcgatcccattccctctcatctcttgcaagccatctctcctgcagtcataccaacactgactcacataattaacacatctcttgactctggtttattccccactacatttaagcaggctagggtaaccccactgctaaagaaacccaacctggaccatacgctacttgaaaactacagaccagtatccctgcttccattcatggccaagattctggagaaagtagtgttcaatcaagtcctggactttcttactcaaaacaatctcatggacaacaagcaatccggctttaagaaaggccactcaactgagactgccctgctctcggtcgtggaggatctcagactggctaaagcagactctaaatcatcagtcctcattttgctggacttgtcagctgcttttgacactgtcaaccaccagatcctgctatctacgcttgagtcactgggcgttgcgggcactgttatacaatggtttagatcttacctctctgacaggtcattcagggtgtcttggaggggagaggtgtccaacctacagcatctaaacactggggtacctcaaggctctgttcttgggccacttctcttctccatctacacatcatctctaggaccagtcatccagagacatggattctcctaccactgctatgctgatgacacccagctatacctctcttttcatcctgatgatccctcggttccagctcgtatctcagcctgcctgttggatatttcacactggatgaaagatcatcatcttcagctgaacctcgcaaaaacggaaatgcttgtagtttctgccaacccgactctacaccataacttttcaatccagatggatggggcaaccattactgcatccaaaatggtgaaaagccttggagtaacgattgatgaccaactaaacttctctgaccacatttctagaactgctcgatcgtgcagatttgcactctataacatcagaaagatccgacccttcttatctgaacatgcagctcaactccttgttcaagctcttgttctctccaaactggattactgcaactctctactagctttgcttccagctaactctatcaagcctcttcaactgctccagaatgcagcagcacgagttgtcttcaatgaacctaaacgagcacatgtcactccgctgctagtccgtttgcactggctgccagttgctgctcgcatcaaattcaaaactctgatgtttgcctacaaagtgacttctggcctagcaccttcttatctgcactcacttctgcagatctatgtgccctccagaaacttgcgttctgtgaatgaacgtcgcctcgtggttccatcccaaagagggaaaaaatcactttcgcgaacgctcacgctcaatctgcccagttggtggaatgaactccctaactgcatcagaacagcagagtcactcgctattttcaagaaacgactaaaaactcaactatttagtctccacttcacttcctccggctccgagactcctggaacaagcgagagcgctacacctgagggcagccccacactgctgggcttccacaccgccagcggcaagaaggtgaagatcgccaaggaatccctggataaggtgaaaaacctgttcgacgagaaggagcagggcggatctggcaaaagaaccgctgatggcagcgagttcgagagccccaagaaaaagagaaaggtgtaagctgcaattgcctctttgaatatcacactaattgtacaaaaaaaaaaaaaaaaaaaaaaaaaactactaacacttcccttcttagactttacagaccgcggcctactcggatccgcgatgatgatcagacatgataagatacattgatgagtttggacaaaccacaactagaatgcagtgaaaaaaatgctttatttgtgaaatttgtgatgctattgctttatttgtaaccattataagctgcaataaacaagttaacaacaacaaaaaaaaaaaaaaaaaaaaatttaaatgcgcgcatcatcggatgccgggaccgacgagtgcagaggcgtgcaagcgagcttggcgtaatcatggtcatagctgtttcctgtgtgaaattgttatccgctcacaattccacacaacatacgagccggaagcataaagtgtaaagcctggggtgcctaatgagtgagctaactcacattaattgcgttgcgctcactgcccgctttccagtcgggaaacctgtcgtgccagctgcattaatgaatcggccaacgcgcggggagaggcggtttgcgtattgggcgctcttccgcttcctcgctcactgactcgctgcgctcggtcgttcggctgcggcgagcggtatcagctcactcaaaggcggtaatacggttatccacagaatcaggggataacgcaggaaagaacatgtgagcaaaaggccagcaaaaggccaggaaccgtaaaaaggccgcgttgctggcgtttttccataggctccgcccccctgacgagcatcacaaaaatcgacgctcaagtcagaggtggcgaaacccgacaggactataaagataccaggcgtttccccctggaagctccctcgtgcgctctcctgttccgaccctgccgcttaccggatacctgtccgcctttctcccttcgggaagcgtggcgctttctcatagctcacgctgtaggtatctcagttcggtgtaggtcgttcgctccaagctgggctgtgtgcacgaaccccccgttcagcccgaccgctgcgccttatccggtaactatcgtcttgagtccaacccggtaagacacgacttatcgccactggcagcagccactggtaacaggattagcagagcgaggtatgtaggcggtgctacagagttcttgaagtggtggcctaactacggctacactagaagaacagtatttggtatctgcgctctgctgaagccagttaccttcggaaaaagagttggtagctcttgatccggcaaacaaaccaccgctggtagcggtggtttttttgtttgcaagcagcagattacgcgcagaaaaaaaggatctcaagaagatcctttgatcttttctacggggtctgacgctcagtggaacgaaaactcacgttaagggattttggtcatgagattatcaaaaaggatcttcacctagatccttttaaattaaaaatgaagttttaaatcaatctaaagtatatatgagtaaacttggtctgacagttaccaatgcttaatcagtgaggcacctatctcagcgatctgtctatttcgttcatccatagttgcctgactccccgtcgtgtagataactacgatacgggagggcttaccatctggccccagtgctgcaatgataccgcgagacccacgctcaccggctccagatttatcagcaataaaccagccagccggaagggccgagcgcagaagtggtcctgcaactttatccgcctccatccagtctattaattgttgccgggaagctagagtaagtagttcgccagttaatagtttgcgcaacgttgttgccattgctacaggcatcgtggtgtcacgctcgtcgtttggtatggcttcattcagctccggttcccaacgatcaaggcgagttacatgatcccccatgttgtgcaaaaaagcggttagctccttcggtcctccgatcgttgtcagaagtaagttggccgcagtgttatcactcatggttatggcagcactgcataattctcttactgtcatgccatccgtaagatgcttttctgtgactggtgagtactcaaccaagtcattctgagaatagtgtatgcggcgaccgagttgctcttgcccggcgtcaatacgggataataccgcgccacatagcagaactttaaaagtgctcatcattggaaaacgttcttcggggcgaaaactctcaaggatcttaccgctgttgagatccagttcgatgtaacccactcgtgcacccaactgatcttcagcatcttttactttcaccagcgtttctgggtgagcaaaaacaggaaggcaaaatgccgcaaaaaagggaataagggcgacacggaaatgttgaatactcatactcttcctttttcaatattattgaagcatttatcagggttattgtctcatgagcggatacatatttgaatgtatttagaaaaataaacaaataggggttccgcgcacatttccccgaaaagtgccacctgacgtctaagaaaccattattatcatgacattaacctataaaaataggcgtatcacgaggccctttcgtc

SEQ ID NO: 39 - protein, 1200 aa, synthetic construct
MPKRKVSSAEGAAKEEPKRRSARLSAKPPAKVEAKPKKAAAKDKSSDKKVQTKGKRGAKGKQAEVANQETKEDLPAENGETKTEESPASDEAGEKEAKSDSGSETPGTSESATPESCFLIPVVTNTRKTREVRCKRNPHNLRSIHVSTISQLSLSVGLWNCQSAVNKADFITSIATYSDYNLMALTETWLRPEDTATHATLSANFSFSHTPRQTGRGGGTGLLISKEWKFTLIPSLPTISSFEFHAVTIIHPFYINVVVIYRPPGKLGHFLDELDVLLSSFSNFDTPLLVLGDFNIYVDKPQAADFQTLLASFDLKRAPTSATHKSGNQLDLIYTRHCFTDQTIVTPLQISDHFLLSLNIHITPEPPHTPTLVTFRRNLRSLSPNRLSTIVSDSLPPSRKLTALDSNSATNTLCSTLASCLDRLCPLASRPARASPPAPWLSDALREHRSKLRAAERIWRKTKNPAHLLTYQTLLSSFSAEVTSAKQTYYRLKINNATNPRLLFKTFSSLLYPPPPPASSTLTTDDFATFFCTKTAKISAQFAAPTTNTQDTTPTPHTLTSFSQLSESEVSKLVLSSHATTCPLDPIPSHLLQAISPAVIPTLTHIINTSLDSGLFPTTFKQARVTPLLKKPNLDHTLLENYRPVSLLPFMAKILEKVVFNQVLDFLTQNNLMDNKQSGFKKGHSTETALLSVVEDLRLAKADSKSSVLILLDLSAAFDTVNHQILLSTLESLGVAGTVIQWFRSYLSDRSFRVSWRGEVSNLQHLNTGVPQGSVLGPLLFSIYTSSLGPVIQRHGFSYHCYADDTQLYLSFHPDDPSVPARISACLLDISHWMKDHHLQLNLAKTEMLVVSANPTLHHNFSIQMDGATITASKMVKSLGVTIDDQLNFSDHISRTARSCRFALYNIRKIRPFLSEHAAQLLVQALVLSKLDYCNSLLALLPANSIKPLQLLQNAAARVVFNEPKRAHVTPLLVRLHWLPVAARIKFKTLMFAYKVTSGLAPSYLHSLLQIYVPSRNLRSVNERRLVVPSQRGKKSLSRTLTLNLPSWWNELPNCIRTAESLAIFKKRLKTQLFSLHFTSSGSETPGTSESATPEGKGDPKKPRGKMSSYAFFVQTCREEHKKKHPDASVNFSEFSKKCSERWKTMSAKEKGKFEDMAKADKARYEREMKTYIPPKGEGGSGKRTADGSEFESPKKKRKV

SEQ ID NO: 40 - DNA, 6832 bp, synthetic construct
  source 1..6832: mol_type = other DNA
tcgcgcgtttcggtgatgacggtgaaaacctctgacacatgcagctcccggagacggtcacagcttgtctgtaagcggatgccgggagcagacaagcccgtcagggcgcgtcagcgggtgttggcgggtgtcggggctggcttaactatgcggcatcagagcagattgtactgagagtgcaccatatgcggtgtgaaataccgcacagatgcgtaaggagaaaataccgcatcaggcgccattcgccattcaggctgcgcaactgttgggaagggcgatcggtgcgggcctcttcgctattacgccagctggcgaaagggggatgtgctgcaaggcgattaagttgggtaacgccagggttttcccagtcacgacgttgtaaaacgacggccagtgaattggagatcggtacttcgcgaatgcgtcgagattgcagggtcgactaatacgactcactatagggagagatatccctagctagttcaccgcggcagcggtcgcggcagcctcgtgtgaagaccgacgagggtaaagaccatcgactctacctgcgcgactccaccgagcaaagacaccgacaaagcacttgagtactttactttattgttttactttacacttattttttgttgtcagtgcacttttattatgcctaagagaaaggtgtccagcgccgagggcgctgccaaggaagagcctaaacggagaagcgccagactgagcgccaagccccccgccaaggtggaagccaagcctaagaaggccgccgctaaggacaagagcagcgataagaaagtccagaccaagggcaagcggggcgccaaaggcaaacaggccgaggtggccaaccaggagacaaaggaagatctgcctgctgagaacggcgaaaccaagaccgaggaatctccagcttctgacgaggccggagagaaggaggccaaaagcgacagcggctctgagacacctggaacaagcgagagcgccaccccggaatcctgttttctaattcctgttgttactaacactcgcaaaacacgggaggtacgctgcaagcgtaatcctcacaaccttcgttcaatacatgtatctactatttcacaactctctctctccgtgggcctctggaattgtcaatcagctgttaacaaggctgattttattacctccatagctacatattctgactataatctcatggctctaactgagacctggttgaggccggaggacactgctacacatgctactctttctgctaatttctctttttcccacactcctcgtcagacagggagagggggtgggactggactactaatttccaaagaatggaaatttactctgataccgtccctgccaacaatcagctcctttgaattccatgcagtcaccattatccaccccttctacataaatgtggttgtcatctaccgcccaccaggtaaattaggtcacttcctagatgaactggatgttcttctctcatctttttctaattttgacactcccttattggtgctaggtgacttcaacatttacgttgacaaaccgcaagctgcagactttcagactttgcttgcctcttttgacctaaaaagagcacctacttctgctacccacaaatcaggtaatcagctagaccttatttacacacgacactgcttcactgatcaaacaatagtaactccactacaaatatctgatcatttccttctgtctctcaacatccacattactcctgagccgccacacactcctacactggttacctttcgcagaaacctacgatctctctcacccaatagactatccaccattgtttcagactctcttcctccatctcgcaaactcactgcacttgattcgaacagtgccactaatacactctgctccacactagcatcatgtctagaccgattatgtcctcttgcatccaggccagcccgtgccagtcctcctgcaccctggctctcggatgctctccgtgagcatcgctcaaaacttcgggctgcggagagaatttggcggaaaactaaaaatcctgcacatctcttaacataccaaactcttctgtcctctttctcagctgaggttacttctgcaaagcagacgtattaccgtctgaaaatcaacaatgccactaatcctcgcctactttttaaaacattttcctccctcctatatcctcctcctccacccgcatcctccacacttactactgatgactttgctacattcttctgcaccaaaactgcaaaaatcagtgctcaatttgctgcacctacaacaaacacgcaagatacaacaccaacaccacacacactcacctctttttctcagctctctgagtctgaggtgtccaaacttgtgctatctagccatgcaaccacctgtccactcgatcccattccctctcatctcttgcaagccatctctcctgcagtcataccaacactgactcacataattaacacatctcttgactctggtttattccccactacatttaagcaggctagggtaaccccactgctaaagaaacccaacctggaccatacgctacttgaaaactacagaccagtatccctgcttccattcatggccaagattctggagaaagtagtgttcaatcaagtcctggactttcttactcaaaacaatctcatggacaacaagcaatccggctttaagaaaggccactcaactgagactgccctgctctcggtcgtggaggatctcagactggctaaagcagactctaaatcatcagtcctcattttgctggacttgtcagctgcttttgacactgtcaaccaccagatcctgctatctacgcttgagtcactgggcgttgcgggcactgttatacaatggtttagatcttacctctctgacaggtcattcagggtgtcttggaggggagaggtgtccaacctacagcatctaaacactggggtacctcaaggctctgttcttgggccacttctcttctccatctacacatcatctctaggaccagtcatccagagacatggattctcctaccactgctatgctgatgacacccagctatacctctcttttcatcctgatgatccctcggttccagctcgtatctcagcctgcctgttggatatttcacactggatgaaagatcatcatcttcagctgaacctcgcaaaaacggaaatgcttgtagtttctgccaacccgactctacaccataacttttcaatccagatggatggggcaaccattactgcatccaaaatggtgaaaagccttggagtaacgattgatgaccaactaaacttctctgaccacatttctagaactgctcgatcgtgcagatttgcactctataacatcagaaagatccgacccttcttatctgaacatgcagctcaactccttgttcaagctcttgttctctccaaactggattactgcaactctctactagctttgcttccagctaactctatcaagcctcttcaactgctccagaatgcagcagcacgagttgtcttcaatgaacctaaacgagcacatgtcactccgctgctagtccgtttgcactggctgccagttgctgctcgcatcaaattcaaaactctgatgtttgcctacaaagtgacttctggcctagcaccttcttatctgcactcacttctgcagatctatgtgccctccagaaacttgcgttctgtgaatgaacgtcgcctcgtggttccatcccaaagagggaaaaaatcactttcgcgaacgctcacgctcaatctgcccagttggtggaatgaactccctaactgcatcagaacagcagagtcactcgctattttcaagaaacgactaaaaactcaactatttagtctccacttcacttcctccggctccgagactcctggaacaagcgagagcgctacacctgagggaaaaggcgaccccaagaaacctagaggcaagatgagcagctacgcctttttcgtgcagacctgtcgggaagagcacaagaaaaagcaccctgacgccagcgtgaacttctctgagttcagcaagaagtgcagcgagagatggaagacaatgtccgccaaggaaaagggcaagttcgaggacatggccaaggctgataaggccagatacgagcgggaaatgaaaacctacatcccacctaagggcgagggcggatctggcaaaagaaccgctgatggcagcgagttcgagagccccaagaaaaagagaaaggtgtaagctgcaattgcctctttgaatatcacactaattgtacaaaaaaaaaaaaaaaaaaaaaaaaaactactaacacttcccttcttagactttacagaccgcggcctactcggatccgcgatgatgatcagacatgataagatacattgatgagtttggacaaaccacaactagaatgcagtgaaaaaaatgctttatttgtgaaatttgtgatgctattgctttatttgtaaccattataagctgcaataaacaagttaacaacaacaaaaaaaaaaaaaaaaaaaaatttaaatgcgcgcatcatcggatgccgggaccgacgagtgcagaggcgtgcaagcgagcttggcgtaatcatggtcatagctgtttcctgtgtgaaattgttatccgctcacaattccacacaacatacgagccggaagcataaagtgtaaagcctggggtgcctaatgagtgagctaactcacattaattgcgttgcgctcactgcccgctttccagtcgggaaacctgtcgtgccagctgcattaatgaatcggccaacgcgcggggagaggcggtttgcgtattgggcgctcttccgcttcctcgctcactgactcgctgcgctcggtcgttcggctgcggcgagcggtatcagctcactcaaaggcggtaatacggttatccacagaatcaggggataacgcaggaaagaacatgtgagcaaaaggccagcaaaaggccaggaaccgtaaaaaggccgcgttgctggcgtttttccataggctccgcccccctgacgagcatcacaaaaatcgacgctcaagtcagaggtggcgaaacccgacaggactataaagataccaggcgtttccccctggaagctccctcgtgcgctctcctgttccgaccctgccgcttaccggatacctgtccgcctttctcccttcgggaagcgtggcgctttctcatagctcacgctgtaggtatctcagttcggtgtaggtcgttcgctccaagctgggctgtgtgcacgaaccccccgttcagcccgaccgctgcgccttatccggtaactatcgtcttgagtccaacccggtaagacacgacttatcgccactggcagcagccactggtaacaggattagcagagcgaggtatgtaggcggtgctacagagttcttgaagtggtggcctaactacggctacactagaagaacagtatttggtatctgcgctctgctgaagccagttaccttcggaaaaagagttggtagctcttgatccggcaaacaaaccaccgctggtagcggtggtttttttgtttgcaagcagcagattacgcgcagaaaaaaaggatctcaagaagatcctttgatcttttctacggggtctgacgctcagtggaacgaaaactcacgttaagggattttggtcatgagattatcaaaaaggatcttcacctagatccttttaaattaaaaatgaagttttaaatcaatctaaagtatatatgagtaaacttggtctgacagttaccaatgcttaatcagtgaggcacctatctcagcgatctgtctatttcgttcatccatagttgcctgactccccgtcgtgtagataactacgatacgggagggcttaccatctggccccagtgctgcaatgataccgcgagacccacgctcaccggctccagatttatcagcaataaaccagccagccggaagggccgagcgcagaagtggtcctgcaactttatccgcctccatccagtctattaattgttgccgggaagctagagtaagtagttcgccagttaatagtttgcgcaacgttgttgccattgctacaggcatcgtggtgtcacgctcgtcgtttggtatggcttcattcagctccggttcccaacgatcaaggcgagttacatgatcccccatgttgtgcaaaaaagcggttagctccttcggtcctccgatcgttgtcagaagtaagttggccgcagtgttatcactcatggttatggcagcactgcataattctcttactgtcatgccatccgtaagatgcttttctgtgactggtgagtactcaaccaagtcattctgagaatagtgtatgcggcgaccgagttgctcttgcccggcgtcaatacgggataataccgcgccacatagcagaactttaaaagtgctcatcattggaaaacgttcttcggggcgaaaactctcaaggatcttaccgctgttgagatccagttcgatgtaacccactcgtgcacccaactgatcttcagcatcttttactttcaccagcgtttctgggtgagcaaaaacaggaaggcaaaatgccgcaaaaaagggaataagggcgacacggaaatgttgaatactcatactcttcctttttcaatattattgaagcatttatcagggttattgtctcatgagcggatacatatttgaatgtatttagaaaaataaacaaataggggttccgcgcacatttccccgaaaagtgccacctgacgtctaagaaaccattattatcatgacattaacctataaaaataggcgtatcacgaggccctttcgtc

SEQ ID NO: 41 - protein, 1342 aa, synthetic construct
MPKRKVSSAEGAAKEEPKRRSARLSAKPPAKVEAKPKKAAAKDKSSDKKVQTKGKRGAKGKQAEVANQETKEDLPAENGETKTEESPASDEAGEKEAKSDSGSETPGTSESATPESCFLIPVVTNTRKTREVRCKRNPHNLRSIHVSTISQLSLSVGLWNCQSAVNKADFITSIATYSDYNLMALTETWLRPEDTATHATLSANFSFSHTPRQTGRGGGTGLLISKEWKFTLIPSLPTISSFEFHAVTIIHPFYINVVVIYRPPGKLGHFLDELDVLLSSFSNFDTPLLVLGDFNIYVDKPQAADFQTLLASFDLKRAPTSATHKSGNQLDLIYTRHCFTDQTIVTPLQISDHFLLSLNIHITPEPPHTPTLVTFRRNLRSLSPNRLSTIVSDSLPPSRKLTALDSNSATNTLCSTLASCLDRLCPLASRPARASPPAPWLSDALREHRSKLRAAERIWRKTKNPAHLLTYQTLLSSFSAEVTSAKQTYYRLKINNATNPRLLFKTFSSLLYPPPPPASSTLTTDDFATFFCTKTAKISAQFAAPTTNTQDTTPTPHTLTSFSQLSESEVSKLVLSSHATTCPLDPIPSHLLQAISPAVIPTLTHIINTSLDSGLFPTTFKQARVTPLLKKPNLDHTLLENYRPVSLLPFMAKILEKVVFNQVLDFLTQNNLMDNKQSGFKKGHSTETALLSVVEDLRLAKADSKSSVLILLDLSAAFDTVNHQILLSTLESLGVAGTVIQWFRSYLSDRSFRVSWRGEVSNLQHLNTGVPQGSVLGPLLFSIYTSSLGPVIQRHGFSYHCYADDTQLYLSFHPDDPSVPARISACLLDISHWMKDHHLQLNLAKTEMLVVSANPTLHHNFSIQMDGATITASKMVKSLGVTIDDQLNFSDHISRTARSCRFALYNIRKIRPFLSEHAAQLLVQALVLSKLDYCNSLLALLPANSIKPLQLLQNAAARVVFNEPKRAHVTPLLVRLHWLPVAARIKFKTLMFAYKVTSGLAPSYLHSLLQIYVPSRNLRSVNERRLVVPSQRGKKSLSRTLTLNLPSWWNELPNCIRTAESLAIFKKRLKTQLFSLHFTSSGSETPGTSESATPEGSESTVGPACPPGRTVTKRPWALAEDTPRGPDSPPKRPRPNSLPLTTTFRPLPPPPQTTSAVDPSSHSPVNPPRDQHATDTADEKPRAASPALSDASGPPTPDIPLSPGGTHARDPDADPDSPDLDSSGSETPGTSESATPEGKGDPKKPRGKMSSYAFFVQTCREEHKKKHPDASVNFSEFSKKCSERWKTMSAKEKGKFEDMAKADKARYEREMKTYIPPKGEGGSGKRTADGSEFESPKKKRKV

SEQ ID NO: 42 - DNA, 7258 bp, synthetic construct
  source 1..7258: mol_type = other DNA
tcgcgcgtttcggtgatgacggtgaaaacctctgacacatgcagctcccggagacggtcacagcttgtctgtaagcggatgccgggagcagacaagcccgtcagggcgcgtcagcgggtgttggcgggtgtcggggctggcttaactatgcggcatcagagcagattgtactgagagtgcaccatatgcggtgtgaaataccgcacagatgcgtaaggagaaaataccgcatcaggcgccattcgccattcaggctgcgcaactgttgggaagggcgatcggtgcgggcctcttcgctattacgccagctggcgaaagggggatgtgctgcaaggcgattaagttgggtaacgccagggttttcccagtcacgacgttgtaaaacgacggccagtgaattggagatcggtacttcgcgaatgcgtcgagattgcagggtcgactaatacgactcactatagggagagatatccctagctagttcaccgcggcagcggtcgcggcagcctcgtgtgaagaccgacgagggtaaagaccatcgactctacctgcgcgactccaccgagcaaagacaccgacaaagcacttgagtactttactttattgttttactttacacttattttttgttgtcagtgcacttttattatgcctaagagaaaggtgtccagcgccgagggcgctgccaaggaagagcctaaacggagaagcgccagactgagcgccaagccccccgccaaggtggaagccaagcctaagaaggccgccgctaaggacaagagcagcgataagaaagtccagaccaagggcaagcggggcgccaaaggcaaacaggccgaggtggccaaccaggagacaaaggaagatctgcctgctgagaacggcgaaaccaagaccgaggaatctccagcttctgacgaggccggagagaaggaggccaaaagcgacagcggctctgagacacctggaacaagcgagagcgccaccccggaatcctgttttctaattcctgttgttactaacactcgcaaaacacgggaggtacgctgcaagcgtaatcctcacaaccttcgttcaatacatgtatctactatttcacaactctctctctccgtgggcctctggaattgtcaatcagctgttaacaaggctgattttattacctccatagctacatattctgactataatctcatggctctaactgagacctggttgaggccggaggacactgctacacatgctactctttctgctaatttctctttttcccacactcctcgtcagacagggagagggggtgggactggactactaatttccaaagaatggaaatttactctgataccgtccctgccaacaatcagctcctttgaattccatgcagtcaccattatccaccccttctacataaatgtggttgtcatctaccgcccaccaggtaaattaggtcacttcctagatgaactggatgttcttctctcatctttttctaattttgacactcccttattggtgctaggtgacttcaacatttacgttgacaaaccgcaagctgcagactttcagactttgcttgcctcttttgacctaaaaagagcacctacttctgctacccacaaatcaggtaatcagctagaccttatttacacacgacactgcttcactgatcaaacaatagtaactccactacaaatatctgatcatttccttctgtctctcaacatccacattactcctgagccgccacacactcctacactggttacctttcgcagaaacctacgatctctctcacccaatagactatccaccattgtttcagactctcttcctccatctcgcaaactcactgcacttgattcgaacagtgccactaatacactctgctccacactagcatcatgtctagaccgattatgtcctcttgcatccaggccagcccgtgccagtcctcctgcaccctggctctcggatgctctccgtgagcatcgctcaaaacttcgggctgcggagagaatttggcggaaaactaaaaatcctgcacatctcttaacataccaaactcttctgtcctctttctcagctgaggttacttctgcaaagcagacgtattaccgtctgaaaatcaacaatgccactaatcctcgcctactttttaaaacattttcctccctcctatatcctcctcctccacccgcatcctccacacttactactgatgactttgctacattcttctgcaccaaaactgcaaaaatcagtgctcaatttgctgcacctacaacaaacacgcaagatacaacaccaacaccacacacactcacctctttttctcagctctctgagtctgaggtgtccaaacttgtgctatctagccatgcaaccacctgtccactcgatcccattccctctcatctcttgcaagccatctctcctgcagtcataccaacactgactcacataattaacacatctcttgactctggtttattccccactacatttaagcaggctagggtaaccccactgctaaagaaacccaacctggaccatacgctacttgaaaactacagaccagtatccctgcttccattcatggccaagattctggagaaagtagtgttcaatcaagtcctggactttcttactcaaaacaatctcatggacaacaagcaatccggctttaagaaaggccactcaactgagactgccctgctctcggtcgtggaggatctcagactggctaaagcagactctaaatcatcagtcctcattttgctggacttgtcagctgcttttgacactgtcaaccaccagatcctgctatctacgcttgagtcactgggcgttgcgggcactgttatacaatggtttagatcttacctctctgacaggtcattcagggtgtcttggaggggagaggtgtccaacctacagcatctaaacactggggtacctcaaggctctgttcttgggccacttctcttctccatctacacatcatctctaggaccagtcatccagagacatggattctcctaccactgctatgctgatgacacccagctatacctctcttttcatcctgatgatccctcggttccagctcgtatctcagcctgcctgttggatatttcacactggatgaaagatcatcatcttcagctgaacctcgcaaaaacggaaatgcttgtagtttctgccaacccgactctacaccataacttttcaatccagatggatggggcaaccattactgcatccaaaatggtgaaaagccttggagtaacgattgatgaccaactaaacttctctgaccacatttctagaactgctcgatcgtgcagatttgcactctataacatcagaaagatccgacccttcttatctgaacatgcagctcaactccttgttcaagctcttgttctctccaaactggattactgcaactctctactagctttgcttccagctaactctatcaagcctcttcaactgctccagaatgcagcagcacgagttgtcttcaatgaacctaaacgagcacatgtcactccgctgctagtccgtttgcactggctgccagttgctgctcgcatcaaattcaaaactctgatgtttgcctacaaagtgacttctggcctagcaccttcttatctgcactcacttctgcagatctatgtgccctccagaaacttgcgttctgtgaatgaacgtcgcctcgtggttccatcccaaagagggaaaaaatcactttcgcgaacgctcacgctcaatctgcccagttggtggaatgaactccctaactgcatcagaacagcagagtcactcgctattttcaagaaacgactaaaaactcaactatttagtctccacttcacttcctccggctccgagactcctggaacaagcgagagcgctacacctgagggcagcgaaagcacagtcggccctgcttgccccccaggaagaaccgtgaccaagcggccctgggccctggccgaggacacccctaggggccccgatagcccccccaaaagaccccggcctaacagcctgcctctgaccacaacattcagacctctgcctcctccacctcagaccaccagcgccgtggaccctagcagccactcccctgtgaacccccctcgggaccagcacgccacagataccgccgacgagaagcccagagccgcttctccagccctgagcgacgccagcggacctcctacccctgacatccccctgtctcctggcggcacccacgccagagatcctgatgctgatcctgactctccagacctggacagctccggctccgagactcctggaacaagcgagagcgctacacctgagggaaaaggcgaccccaagaaacctagaggcaagatgagcagctacgcctttttcgtgcagacctgtcgggaagagcacaagaaaaagcaccctgacgccagcgtgaacttctctgagttcagcaagaagtgcagcgagagatggaagacaatgtccgccaaggaaaagggcaagttcgaggacatggccaaggctgataaggccagatacgagcgggaaatgaaaacctacatcccacctaagggcgagggcggatctggcaaaagaaccgctgatggcagcgagttcgagagccccaagaaaaagagaaaggtgtaagctgcaattgcctctttgaatatcacactaattgtacaaaaaaaaaaaaaaaaaaaaaaaaaactactaacacttcccttcttagactttacagaccgcggcctactcggatccgcgatgatgatcagacatgataagatacattgatgagtttggacaaaccacaactagaatgcagtgaaaaaaatgctttatttgtgaaatttgtgatgctattgctttatttgtaaccattataagctgcaataaacaagttaacaacaacaaaaaaaaaaaaaaaaaaaaatttaaatgcgcgcatcatcggatgccgggaccgacgagtgcagaggcgtgcaagcgagcttggcgtaatcatggtcatagctgtttcctgtgtgaaattgttatccgctcacaattccacacaacatacgagccggaagcataaagtgtaaagcctggggtgcctaatgagtgagctaactcacattaattgcgttgcgctcactgcccgctttccagtcgggaaacctgtcgtgccagctgcattaatgaatcggccaacgcgcggggagaggcggtttgcgtattgggcgctcttccgcttcctcgctcactgactcgctgcgctcggtcgttcggctgcggcgagcggtatcagctcactcaaaggcggtaatacggttatccacagaatcaggggataacgcaggaaagaacatgtgagcaaaaggccagcaaaaggccaggaaccgtaaaaaggccgcgttgctggcgtttttccataggctccgcccccctgacgagcatcacaaaaatcgacgctcaagtcagaggtggcgaaacccgacaggactataaagataccaggcgtttccccctggaagctccctcgtgcgctctcctgttccgaccctgccgcttaccggatacctgtccgcctttctcccttcgggaagcgtggcgctttctcatagctcacgctgtaggtatctcagttcggtgtaggtcgttcgctccaagctgggctgtgtgcacgaaccccccgttcagcccgaccgctgcgccttatccggtaactatcgtcttgagtccaacccggtaagacacgacttatcgccactggcagcagccactggtaacaggattagcagagcgaggtatgtaggcggtgctacagagttcttgaagtggtggcctaactacggctacactagaagaacagtatttggtatctgcgctctgctgaagccagttaccttcggaaaaagagttggtagctcttgatccggcaaacaaaccaccgctggtagcggtggtttttttgtttgcaagcagcagattacgcgcagaaaaaaaggatctcaagaagatcctttgatcttttctacggggtctgacgctcagtggaacgaaaactcacgttaagggattttggtcatgagattatcaaaaaggatcttcacctagatccttttaaattaaaaatgaagttttaaatcaatctaaagtatatatgagtaaacttggtctgacagttaccaatgcttaatcagtgaggcacctatctcagcgatctgtctatttcgttcatccatagttgcctgactccccgtcgtgtagataactacgatacgggagggcttaccatctggccccagtgctgcaatgataccgcgagacccacgctcaccggctccagatttatcagcaataaaccagccagccggaagggccgagcgcagaagtggtcctgcaactttatccgcctccatccagtctattaattgttgccgggaagctagagtaagtagttcgccagttaatagtttgcgcaacgttgttgccattgctacaggcatcgtggtgtcacgctcgtcgtttggtatggcttcattcagctccggttcccaacgatcaaggcgagttacatgatcccccatgttgtgcaaaaaagcggttagctccttcggtcctccgatcgttgtcagaagtaagttggccgcagtgttatcactcatggttatggcagcactgcataattctcttactgtcatgccatccgtaagatgcttttctgtgactggtgagtactcaaccaagtcattctgagaatagtgtatgcggcgaccgagttgctcttgcccggcgtcaatacgggataataccgcgccacatagcagaactttaaaagtgctcatcattggaaaacgttcttcggggcgaaaactctcaaggatcttaccgctgttgagatccagttcgatgtaacccactcgtgcacccaactgatcttcagcatcttttactttcaccagcgtttctgggtgagcaaaaacaggaaggcaaaatgccgcaaaaaagggaataagggcgacacggaaatgttgaatactcatactcttcctttttcaatattattgaagcatttatcagggttattgtctcatgagcggatacatatttgaatgtatttagaaaaataaacaaataggggttccgcgcacatttccccgaaaagtgccacctgacgtctaagaaaccattattatcatgacattaacctataaaaataggcgtatcacgaggccctttcgtc

SEQ ID NO: 43 - protein, 1205 aa, synthetic construct
MCFLIPVVTNTRKTREVRCKRNPHNLRSIHVSTISQLSLSVGLWNCQSAVNKADFITSIATYSDYNLMALTETWLRPEDTATHATLSANFSFSHTPRQTGRGGGTGLLISKEWKFTLIPSLPTISSFEFHAVTIIHPFYINVVVIYRPPGKLGHFLDELDVLLSSFSNFDTPLLVLGDFNIYVDKPQAADFQTLLASFDLKRAPTSATHKSGNQLDLIYTRHCFTDQTIVTPLQISDHFLLSLNIHITPEPPHTPTLVTFRRNLRSLSPNRLSTIVSDSLPPSRKLTALDSNSATNTLCSTLASCLDRLCPLASRPARASPPAPWLSDALREHRSKLRAAERIWRKTKNPAHLLTYQTLLSSFSAEVTSAKQTYYRLKINNATNPRLLFKTFSSLLYPPPPPASSTLTTDDFATFFCTKTAKISAQFAAPTTNTQDTTPTPHTLTSFSQLSESEVSKLVLSSHATTCPLDPIPSHLLQAISPAVIPTLTHIINTSLDSGLFPTTFKQARVTPLLKKPNLDHTLLENYRPVSLLPFMAKILEKVVFNQVLDFLTQNNLMDNKQSGFKKGHSTETALLSVVEDLRLAKADSKSSVLILLDLSAAFDTVNHQILLSTLESLGVAGTVIQWFRSYLSDRSFRVSWRGEVSNLQHLNTGVPQGSVLGPLLFSIYTSSLGPVIQRHGFSYHCYADDTQLYLSFHPDDPSVPARISACLLDISHWMKDHHLQLNLAKTEMLVVSANPTLHHNFSIQMDGATITASKMVKSLGVTIDDQLNFSDHISRTARSCRFALYNIRKIRPFLSEHAAQLLVQALVLSKLDYCNSLLALLPANSIKPLQLLQNAAARVVFNEPKRAHVTPLLVRLHWLPVAARIKFKTLMFAYKVTSGLAPSYLHSLLQIYVPSRNLRSVNERRLVVPSQRGKKSLSRTLTLNLPSWWNELPNCIRTAESLAIFKKRLKTQLFSLHFTSSGSETPGTSESATPEGSESTVGPACPPGRTVTKRPWALAEDTPRGPDSPPKRPRPNSLPLTTTFRPLPPPPQTTSAVDPSSHSPVNPPRDQHATDTADEKPRAASPALSDASGPPTPDIPLSPGGTHARDPDADPDSPDLDSSGSETPGTSESATPEGSVTVKFKYKGEEKEVDISKIKKVWRVGKMISFTYDDNGKTGRGAVSEKDAPKELLQMLEKGGSGKRTADGSEFESPKKKRKV

SEQ ID NO: 44 - DNA, 6847 bp, synthetic construct
  source 1..6847: mol_type = other DNA
tcgcgcgtttcggtgatgacggtgaaaacctctgacacatgcagctcccggagacggtcacagcttgtctgtaagcggatgccgggagcagacaagcccgtcagggcgcgtcagcgggtgttggcgggtgtcggggctggcttaactatgcggcatcagagcagattgtactgagagtgcaccatatgcggtgtgaaataccgcacagatgcgtaaggagaaaataccgcatcaggcgccattcgccattcaggctgcgcaactgttgggaagggcgatcggtgcgggcctcttcgctattacgccagctggcgaaagggggatgtgctgcaaggcgattaagttgggtaacgccagggttttcccagtcacgacgttgtaaaacgacggccagtgaattggagatcggtacttcgcgaatgcgtcgagattgcagggtcgactaatacgactcactatagggagagatatccctagctagttcaccgcggcagcggtcgcggcagcctcgtgtgaagaccgacgagggtaaagaccatcgactctacctgcgcgactccaccgagcaaagacaccgacaaagcacttgagtactttactttattgttttactttacacttattttttgttgtcagtgcacttttattatgtgttttctaattcctgttgttactaacactcgcaaaacacgggaggtacgctgcaagcgtaatcctcacaaccttcgttcaatacatgtatctactatttcacaactctctctctccgtgggcctctggaattgtcaatcagctgttaacaaggctgattttattacctccatagctacatattctgactataatctcatggctctaactgagacctggttgaggccggaggacactgctacacatgctactctttctgctaatttctctttttcccacactcctcgtcagacagggagagggggtgggactggactactaatttccaaagaatggaaatttactctgataccgtccctgccaacaatcagctcctttgaattccatgcagtcaccattatccaccccttctacataaatgtggttgtcatctaccgcccaccaggtaaattaggtcacttcctagatgaactggatgttcttctctcatctttttctaattttgacactcccttattggtgctaggtgacttcaacatttacgttgacaaaccgcaagctgcagactttcagactttgcttgcctcttttgacctaaaaagagcacctacttctgctacccacaaatcaggtaatcagctagaccttatttacacacgacactgcttcactgatcaaacaatagtaactccactacaaatatctgatcatttccttctgtctctcaacatccacattactcctgagccgccacacactcctacactggttacctttcgcagaaacctacgatctctctcacccaatagactatccaccattgtttcagactctcttcctccatctcgcaaactcactgcacttgattcgaacagtgccactaatacactctgctccacactagcatcatgtctagaccgattatgtcctcttgcatccaggccagcccgtgccagtcctcctgcaccctggctctcggatgctctccgtgagcatcgctcaaaacttcgggctgcggagagaatttggcggaaaactaaaaatcctgcacatctcttaacataccaaactcttctgtcctctttctcagctgaggttacttctgcaaagcagacgtattaccgtctgaaaatcaacaatgccactaatcctcgcctactttttaaaacattttcctccctcctatatcctcctcctccacccgcatcctccacacttactactgatgactttgctacattcttctgcaccaaaactgcaaaaatcagtgctcaatttgctgcacctacaacaaacacgcaagatacaacaccaacaccacacacactcacctctttttctcagctctctgagtctgaggtgtccaaacttgtgctatctagccatgcaaccacctgtccactcgatcccattccctctcatctcttgcaagccatctctcctgcagtcataccaacactgactcacataattaacacatctcttgactctggtttattccccactacatttaagcaggctagggtaaccccactgctaaagaaacccaacctggaccatacgctacttgaaaactacagaccagtatccctgcttccattcatggccaagattctggagaaagtagtgttcaatcaagtcctggactttcttactcaaaacaatctcatggacaacaagcaatccggctttaagaaaggccactcaactgagactgccctgctctcggtcgtggaggatctcagactggctaaagcagactctaaatcatcagtcctcattttgctggacttgtcagctgcttttgacactgtcaaccaccagatcctgctatctacgcttgagtcactgggcgttgcgggcactgttatacaatggtttagatcttacctctctgacaggtcattcagggtgtcttggaggggagaggtgtccaacctacagcatctaaacactggggtacctcaaggctctgttcttgggccacttctcttctccatctacacatcatctctaggaccagtcatccagagacatggattctcctaccactgctatgctgatgacacccagctatacctctcttttcatcctgatgatccctcggttccagctcgtatctcagcctgcctgttggatatttcacactggatgaaagatcatcatcttcagctgaacctcgcaaaaacggaaatgcttgtagtttctgccaacccgactctacaccataacttttcaatccagatggatggggcaaccattactgcatccaaaatggtgaaaagccttggagtaacgattgatgaccaactaaacttctctgaccacatttctagaactgctcgatcgtgcagatttgcactctataacatcagaaagatccgacccttcttatctgaacatgcagctcaactccttgttcaagctcttgttctctccaaactggattactgcaactctctactagctttgcttccagctaactctatcaagcctcttcaactgctccagaatgcagcagcacgagttgtcttcaatgaacctaaacgagcacatgtcactccgctgctagtccgtttgcactggctgccagttgctgctcgcatcaaattcaaaactctgatgtttgcctacaaagtgacttctggcctagcaccttcttatctgcactcacttctgcagatctatgtgccctccagaaacttgcgttctgtgaatgaacgtcgcctcgtggttccatcccaaagagggaaaaaatcactttcgcgaacgctcacgctcaatctgcccagttggtggaatgaactccctaactgcatcagaacagcagagtcactcgctattttcaagaaacgactaaaaactcaactatttagtctccacttcacttcctccggctccgagactcctggaacaagcgagagcgctacacctgagggcagcgaaagcacagtcggccctgcttgccccccaggaagaaccgtgaccaagcggccctgggccctggccgaggacacccctaggggccccgatagcccccccaaaagaccccggcctaacagcctgcctctgaccacaacattcagacctctgcctcctccacctcagaccaccagcgccgtggaccctagcagccactcccctgtgaacccccctcgggaccagcacgccacagataccgccgacgagaagcccagagccgcttctccagccctgagcgacgccagcggacctcctacccctgacatccccctgtctcctggcggcacccacgccagagatcctgatgctgatcctgactctccagacctggacagctccggctccgagactcctggaacaagcgagagcgctacacctgagggcagcgtgaccgtgaagttcaagtacaagggcgaggaaaaggaagtggacatcagcaagatcaagaaggtctggcgggtgggcaagatgatcagctttacctacgacgataacggcaagacaggcagaggcgccgtgtccgagaaggacgcccctaaagagctgctgcagatgctggaaaaaggcggatctggcaaaagaaccgctgatggcagcgagttcgagagccccaagaaaaagagaaaggtgtaagctgcaattgcctctttgaatatcacactaattgtacaaaaaaaaaaaaaaaaaaaaaaaaaactactaacacttcccttcttagactttacagaccgcggcctactcggatccgcgatgatgatcagacatgataagatacattgatgagtttggacaaaccacaactagaatgcagtgaaaaaaatgctttatttgtgaaatttgtgatgctattgctttatttgtaaccattataagctgcaataaacaagttaacaacaacaaaaaaaaaaaaaaaaaaaaatttaaatgcgcgcatcatcggatgccgggaccgacgagtgcagaggcgtgcaagcgagcttggcgtaatcatggtcatagctgtttcctgtgtgaaattgttatccgctcacaattccacacaacatacgagccggaagcataaagtgtaaagcctggggtgcctaatgagtgagctaactcacattaattgcgttgcgctcactgcccgctttccagtcgggaaacctgtcgtgccagctgcattaatgaatcggccaacgcgcggggagaggcggtttgcgtattgggcgctcttccgcttcctcgctcactgactcgctgcgctcggtcgttcggctgcggcgagcggtatcagctcactcaaaggcggtaatacggttatccacagaatcaggggataacgcaggaaagaacatgtgagcaaaaggccagcaaaaggccaggaaccgtaaaaaggccgcgttgctggcgtttttccataggctccgcccccctgacgagcatcacaaaaatcgacgctcaagtcagaggtggcgaaacccgacaggactataaagataccaggcgtttccccctggaagctccctcgtgcgctctcctgttccgaccctgccgcttaccggatacctgtccgcctttctcccttcgggaagcgtggcgctttctcatagctcacgctgtaggtatctcagttcggtgtaggtcgttcgctccaagctgggctgtgtgcacgaaccccccgttcagcccgaccgctgcgccttatccggtaactatcgtcttgagtccaacccggtaagacacgacttatcgccactggcagcagccactggtaacaggattagcagagcgaggtatgtaggcggtgctacagagttcttgaagtggtggcctaactacggctacactagaagaacagtatttggtatctgcgctctgctgaagccagttaccttcggaaaaagagttggtagctcttgatccggcaaacaaaccaccgctggtagcggtggtttttttgtttgcaagcagcagattacgcgcagaaaaaaaggatctcaagaagatcctttgatcttttctacggggtctgacgctcagtggaacgaaaactcacgttaagggattttggtcatgagattatcaaaaaggatcttcacctagatccttttaaattaaaaatgaagttttaaatcaatctaaagtatatatgagtaaacttggtctgacagttaccaatgcttaatcagtgaggcacctatctcagcgatctgtctatttcgttcatccatagttgcctgactccccgtcgtgtagataactacgatacgggagggcttaccatctggccccagtgctgcaatgataccgcgagacccacgctcaccggctccagatttatcagcaataaaccagccagccggaagggccgagcgcagaagtggtcctgcaactttatccgcctccatccagtctattaattgttgccgggaagctagagtaagtagttcgccagttaatagtttgcgcaacgttgttgccattgctacaggcatcgtggtgtcacgctcgtcgtttggtatggcttcattcagctccggttcccaacgatcaaggcgagttacatgatcccccatgttgtgcaaaaaagcggttagctccttcggtcctccgatcgttgtcagaagtaagttggccgcagtgttatcactcatggttatggcagcactgcataattctcttactgtcatgccatccgtaagatgcttttctgtgactggtgagtactcaaccaagtcattctgagaatagtgtatgcggcgaccgagttgctcttgcccggcgtcaatacgggataataccgcgccacatagcagaactttaaaagtgctcatcattggaaaacgttcttcggggcgaaaactctcaaggatcttaccgctgttgagatccagttcgatgtaacccactcgtgcacccaactgatcttcagcatcttttactttcaccagcgtttctgggtgagcaaaaacaggaaggcaaaatgccgcaaaaaagggaataagggcgacacggaaatgttgaatactcatactcttcctttttcaatattattgaagcatttatcagggttattgtctcatgagcggatacatatttgaatgtatttagaaaaataaacaaataggggttccgcgcacatttccccgaaaagtgccacctgacgtctaagaaaccattattatcatgacattaacctataaaaataggcgtatcacgaggccctttcgtc

SEQ ID NO: 45 - protein, 965 aa, synthetic construct
MCFLIPVVTNTRKTREVRCKRNPHNLRSIHVSTISQLSLSVGLWNCQSAVNKADFITSIATYSDYNLMALTETWLRPEDTATHATLSANFSFSHTPRQTGRGGGTGLLISKEWKFTLIPSLPTISSFEFHAVTIIHPFYINVVVIYRPPGKLGHFLDELDVLLSSFSNFDTPLLVLGDFNIYVDKPQAADFQTLLASFDLKRAPTSATHKSGNQLDLIYTRHCFTDQTIVTPLQISDHFLLSLNIHITPEPPHTPTLVTFRRNLRSLSPNRLSTIVSDSLPPSRKLTALDSNSATNTLCSTLASCLDRLCPLASRPARASPPAPWLSDALREHRSKLRAAERIWRKTKNPAHLLTYQTLLSSFSAEVTSAKQTYYRLKINNATNPRLLFKTFSSLLYPPPPPASSTLTTDDFATFFCTKTAKISAQFAAPTTNTQDTTPTPHTLTSFSQLSESEVSKLVLSSHATTCPLDPIPSHLLQAISPAVIPTLTHIINTSLDSGLFPTTFKQARVTPLLKKPNLDHTLLENYRPVSLLPFMAKILEKVVFNQVLDFLTQNNLMDNKQSGFKKGHSTETALLSVVEDLRLAKADSKSSVLILLDLSAAFDTVNHQILLSTLESLGVAGTVIQWFRSYLSDRSFRVSWRGEVSNLQHLNTGVPQGSVLGPLLFSIYTSSLGPVIQRHGFSYHCYADDTQLYLSFHPDDPSVPARISACLLDISHWMKDHHLQLNLAKTEMLVVSANPTLHHNFSIQMDGATITASKMVKSLGVTIDDQLNFSDHISRTARSCRFALYNIRKIRPFLSEHAAQLLVQALVLSKLDYCNSLLALLPANSIKPLQLLQNAAARVVFNEPKRAHVTPLLVRLHWLPVAARIKFKTLMFAYKVTSGLAPSYLHSLLQIYVPSRNLRSVNERRLVVPSQRGKKSLSRTLTLNLPSWWNELPNCIRTAESLAIFKKRLKTQLFSLHFTS

SEQ ID NO: 46 - DNA, 5998 bp, synthetic construct
  source 1..5998: mol_type = other DNA
tcgcgcgtttcggtgatgacggtgaaaacctctgacacatgcagctcccggagacggtcacagcttgtctgtaagcggatgccgggagcagacaagcccgtcagggcgcgtcagcgggtgttggcgggtgtcggggctggcttaactatgcggcatcagagcagattgtactgagagtgcaccatatgcggtgtgaaataccgcacagatgcgtaaggagaaaataccgcatcaggcgccattcgccattcaggctgcgcaactgttgggaagggcgatcggtgcgggcctcttcgctattacgccagctggcgaaagggggatgtgctgcaaggcgattaagttgggtaacgccagggttttcccagtcacgacgttgtaaaacgacggccagtgaattggagatcggtacttcgcgaatgcgtcgagattgcagggtcgactaatacgactcactataaggacatttgcttctgacacaactgtgttcactagcaacctcaaacagacaccgccaccatgtgttttctaattcctgttgttactaacactcgcaaaacacgggaggtacgctgcaagcgtaatcctcacaaccttcgttcaatacatgtatctactatttcacaactctctctctccgtgggcctctggaattgtcaatcagctgttaacaaggctgattttattacctccatagctacatattctgactataatctcatggctctaactgagacctggttgaggccggaggacactgctacacatgctactctttctgctaatttctctttttcccacactcctcgtcagacagggagagggggtgggactggactactaatttccaaagaatggaaatttactctgataccgtccctgccaacaatcagctcctttgaattccatgcagtcaccattatccaccccttctacataaatgtggttgtcatctaccgcccaccaggtaaattaggtcacttcctagatgaactggatgttcttctctcatctttttctaattttgacactcccttattggtgctaggtgacttcaacatttacgttgacaaaccgcaagctgcagactttcagactttgcttgcctcttttgacctaaaaagagcacctacttctgctacccacaaatcaggtaatcagctagaccttatttacacacgacactgcttcactgatcaaacaatagtaactccactacaaatatctgatcatttccttctgtctctcaacatccacattactcctgagccgccacacactcctacactggttacctttcgcagaaacctacgatctctctcacccaatagactatccaccattgtttcagactctcttcctccatctcgcaaactcactgcacttgattcgaacagtgccactaatacactctgctccacactagcatcatgtctagaccgattatgtcctcttgcatccaggccagcccgtgccagtcctcctgcaccctggctctcggatgctctccgtgagcatcgctcaaaacttcgggctgcggagagaatttggcggaaaactaaaaatcctgcacatctcttaacataccaaactcttctgtcctctttctcagctgaggttacttctgcaaagcagacgtattaccgtctgaaaatcaacaatgccactaatcctcgcctactttttaaaacattttcctccctcctatatcctcctcctccacccgcatcctccacacttactactgatgactttgctacattcttctgcaccaaaactgcaaaaatcagtgctcaatttgctgcacctacaacaaacacgcaagatacaacaccaacaccacacacactcacctctttttctcagctctctgagtctgaggtgtccaaacttgtgctatctagccatgcaaccacctgtccactcgatcccattccctctcatctcttgcaagccatctctcctgcagtcataccaacactgactcacataattaacacatctcttgactctggtttattccccactacatttaagcaggctagggtaaccccactgctaaagaaacccaacctggaccatacgctacttgaaaactacagaccagtatccctgcttccattcatggccaagattctggagaaagtagtgttcaatcaagtcctggactttcttactcaaaacaatctcatggacaacaagcaatccggctttaagaaaggccactcaactgagactgccctgctctcggtcgtggaggatctcagactggctaaagcagactctaaatcatcagtcctcattttgctggacttgtcagctgcttttgacactgtcaaccaccagatcctgctatctacgcttgagtcactgggcgttgcgggcactgttatacaatggtttagatcttacctctctgacaggtcattcagggtgtcttggaggggagaggtgtccaacctacagcatctaaacactggggtacctcaaggctctgttcttgggccacttctcttctccatctacacatcatctctaggaccagtcatccagagacatggattctcctaccactgctatgctgatgacacccagctatacctctcttttcatcctgatgatccctcggttccagctcgtatctcagcctgcctgttggatatttcacactggatgaaagatcatcatcttcagctgaacctcgcaaaaacggaaatgcttgtagtttctgccaacccgactctacaccataacttttcaatccagatggatggggcaaccattactgcatccaaaatggtgaaaagccttggagtaacgattgatgaccaactaaacttctctgaccacatttctagaactgctcgatcgtgcagatttgcactctataacatcagaaagatccgacccttcttatctgaacatgcagctcaactccttgttcaagctcttgttctctccaaactggattactgcaactctctactagctttgcttccagctaactctatcaagcctcttcaactgctccagaatgcagcagcacgagttgtcttcaatgaacctaaacgagcacatgtcactccgctgctagtccgtttgcactggctgccagttgctgctcgcatcaaattcaaaactctgatgtttgcctacaaagtgacttctggcctagcaccttcttatctgcactcacttctgcagatctatgtgccctccagaaacttgcgttctgtgaatgaacgtcgcctcgtggttccatcccaaagagggaaaaaatcactttcgcgaacgctcacgctcaatctgcccagttggtggaatgaactccctaactgcatcagaacagcagagtcactcgctattttcaagaaacgactaaaaactcaactatttagtctccacttcacttcctaagctgcaattgcctctttgaatatcacactaattgtacaaaaaaaaaaaaaaaaaaaaaaaaaactactaacacttcccttcttagactttacagaccgcggcctactcggatccgcgatgatgatcagacatgataagatacattgatgagtttggacaaaccacaactagaatgcagtgaaaaaaatgctttatttgtgaaatttgtgatgctattgctttatttgtaaccattataagctgcaataaacaagttaacaacaacaaaaaaaaaaaaaaaaaaaaatttaaatgcgcgcatcatcggatgccgggaccgacgagtgcagaggcgtgcaagcgagcttggcgtaatcatggtcatagctgtttcctgtgtgaaattgttatccgctcacaattccacacaacatacgagccggaagcataaagtgtaaagcctggggtgcctaatgagtgagctaactcacattaattgcgttgcgctcactgcccgctttccagtcgggaaacctgtcgtgccagctgcattaatgaatcggccaacgcgcggggagaggcggtttgcgtattgggcgctcttccgcttcctcgctcactgactcgctgcgctcggtcgttcggctgcggcgagcggtatcagctcactcaaaggcggtaatacggttatccacagaatcaggggataacgcaggaaagaacatgtgagcaaaaggccagcaaaaggccaggaaccgtaaaaaggccgcgttgctggcgtttttccataggctccgcccccctgacgagcatcacaaaaatcgacgctcaagtcagaggtggcgaaacccgacaggactataaagataccaggcgtttccccctggaagctccctcgtgcgctctcctgttccgaccctgccgcttaccggatacctgtccgcctttctcccttcgggaagcgtggcgctttctcatagctcacgctgtaggtatctcagttcggtgtaggtcgttcgctccaagctgggctgtgtgcacgaaccccccgttcagcccgaccgctgcgccttatccggtaactatcgtcttgagtccaacccggtaagacacgacttatcgccactggcagcagccactggtaacaggattagcagagcgaggtatgtaggcggtgctacagagttcttgaagtggtggcctaactacggctacactagaagaacagtatttggtatctgcgctctgctgaagccagttaccttcggaaaaagagttggtagctcttgatccggcaaacaaaccaccgctggtagcggtggtttttttgtttgcaagcagcagattacgcgcagaaaaaaaggatctcaagaagatcctttgatcttttctacggggtctgacgctcagtggaacgaaaactcacgttaagggattttggtcatgagattatcaaaaaggatcttcacctagatccttttaaattaaaaatgaagttttaaatcaatctaaagtatatatgagtaaacttggtctgacagttaccaatgcttaatcagtgaggcacctatctcagcgatctgtctatttcgttcatccatagttgcctgactccccgtcgtgtagataactacgatacgggagggcttaccatctggccccagtgctgcaatgataccgcgagacccacgctcaccggctccagatttatcagcaataaaccagccagccggaagggccgagcgcagaagtggtcctgcaactttatccgcctccatccagtctattaattgttgccgggaagctagagtaagtagttcgccagttaatagtttgcgcaacgttgttgccattgctacaggcatcgtggtgtcacgctcgtcgtttggtatggcttcattcagctccggttcccaacgatcaaggcgagttacatgatcccccatgttgtgcaaaaaagcggttagctccttcggtcctccgatcgttgtcagaagtaagttggccgcagtgttatcactcatggttatggcagcactgcataattctcttactgtcatgccatccgtaagatgcttttctgtgactggtgagtactcaaccaagtcattctgagaatagtgtatgcggcgaccgagttgctcttgcccggcgtcaatacgggataataccgcgccacatagcagaactttaaaagtgctcatcattggaaaacgttcttcggggcgaaaactctcaaggatcttaccgctgttgagatccagttcgatgtaacccactcgtgcacccaactgatcttcagcatcttttactttcaccagcgtttctgggtgagcaaaaacaggaaggcaaaatgccgcaaaaaagggaataagggcgacacggaaatgttgaatactcatactcttcctttttcaatattattgaagcatttatcagggttattgtctcatgagcggatacatatttgaatgtatttagaaaaataaacaaataggggttccgcgcacatttccccgaaaagtgccacctgacgtctaagaaaccattattatcatgacattaacctataaaaataggcgtatcacgaggccctttcgtc

SEQ ID NO: 47 - protein, 984 aa, synthetic construct
MAAPREPKKRTTRKKKGSSGCFLIPVVTNTRKTREVRCKRNPHNLRSIHVSTISQLSLSVGLWNCQSAVNKADFITSIATYSDYNLMALTETWLRPEDTATHATLSANFSFSHTPRQTGRGGGTGLLISKEWKFTLIPSLPTISSFEFHAVTIIHPFYINVVVIYRPPGKLGHFLDELDVLLSSFSNFDTPLLVLGDFNIYVDKPQAADFQTLLASFDLKRAPTSATHKSGNQLDLIYTRHCFTDQTIVTPLQISDHFLLSLNIHITPEPPHTPTLVTFRRNLRSLSPNRLSTIVSDSLPPSRKLTALDSNSATNTLCSTLASCLDRLCPLASRPARASPPAPWLSDALREHRSKLRAAERIWRKTKNPAHLLTYQTLLSSFSAEVTSAKQTYYRLKINNATNPRLLFKTFSSLLYPPPPPASSTLTTDDFATFFCTKTAKISAQFAAPTTNTQDTTPTPHTLTSFSQLSESEVSKLVLSSHATTCPLDPIPSHLLQAISPAVIPTLTHIINTSLDSGLFPTTFKQARVTPLLKKPNLDHTLLENYRPVSLLPFMAKILEKVVFNQVLDFLTQNNLMDNKQSGFKKGHSTETALLSVVEDLRLAKADSKSSVLILLDLSAAFDTVNHQILLSTLESLGVAGTVIQWFRSYLSDRSFRVSWRGEVSNLQHLNTGVPQGSVLGPLLFSIYTSSLGPVIQRHGFSYHCYADDTQLYLSFHPDDPSVPARISACLLDISHWMKDHHLQLNLAKTEMLVVSANPTLHHNFSIQMDGATITASKMVKSLGVTIDDQLNFSDHISRTARSCRFALYNIRKIRPFLSEHAAQLLVQALVLSKLDYCNSLLALLPANSIKPLQLLQNAAARVVFNEPKRAHVTPLLVRLHWLPVAARIKFKTLMFAYKVTSGLAPSYLHSLLQIYVPSRNLRSVNERRLVVPSQRGKKSLSRTLTLNLPSWWNELPNCIRTAESLAIFKKRLKTQLFSLHFTS

SEQ ID NO: 48 - DNA, 6184 bp, synthetic construct
  source 1..6184: mol_type = other DNA
tcgcgcgtttcggtgatgacggtgaaaacctctgacacatgcagctcccggagacggtcacagcttgtctgtaagcggatgccgggagcagacaagcccgtcagggcgcgtcagcgggtgttggcgggtgtcggggctggcttaactatgcggcatcagagcagattgtactgagagtgcaccatatgcggtgtgaaataccgcacagatgcgtaaggagaaaataccgcatcaggcgccattcgccattcaggctgcgcaactgttgggaagggcgatcggtgcgggcctcttcgctattacgccagctggcgaaagggggatgtgctgcaaggcgattaagttgggtaacgccagggttttcccagtcacgacgttgtaaaacgacggccagtgaattggagatcggtacttcgcgaatgcgtcgagattgcagggtcgactaatacgactcactatagggagagatatccctagctagttcaccgcggcagcggtcgcggcagcctcgtgtgaagaccgacgagggtaaagaccatcgactctacctgcgcgactccaccgagcaaagacaccgacaaagcacttgagtactttactttattgttttactttacacttattttttgttgtcagtgcacttttattatggccgcccctagagagcccaagaagcggaccacaagaaagaaaaagggctctagcggctgttttctaattcctgttgttactaacactcgcaaaacacgggaggtacgctgcaagcgtaatcctcacaaccttcgttcaatacatgtatctactatttcacaactctctctctccgtgggcctctggaattgtcaatcagctgttaacaaggctgattttattacctccatagctacatattctgactataatctcatggctctaactgagacctggttgaggccggaggacactgctacacatgctactctttctgctaatttctctttttcccacactcctcgtcagacagggagagggggtgggactggactactaatttccaaagaatggaaatttactctgataccgtccctgccaacaatcagctcctttgaattccatgcagtcaccattatccaccccttctacataaatgtggttgtcatctaccgcccaccaggtaaattaggtcacttcctagatgaactggatgttcttctctcatctttttctaattttgacactcccttattggtgctaggtgacttcaacatttacgttgacaaaccgcaagctgcagactttcagactttgcttgcctcttttgacctaaaaagagcacctacttctgctacccacaaatcaggtaatcagctagaccttatttacacacgacactgcttcactgatcaaacaatagtaactccactacaaatatctgatcatttccttctgtctctcaacatccacattactcctgagccgccacacactcctacactggttacctttcgcagaaacctacgatctctctcacccaatagactatccaccattgtttcagactctcttcctccatctcgcaaactcactgcacttgattcgaacagtgccactaatacactctgctccacactagcatcatgtctagaccgattatgtcctcttgcatccaggccagcccgtgccagtcctcctgcaccctggctctcggatgctctccgtgagcatcgctcaaaacttcgggctgcggagagaatttggcggaaaactaaaaatcctgcacatctcttaacataccaaactcttctgtcctctttctcagctgaggttacttctgcaaagcagacgtattaccgtctgaaaatcaacaatgccactaatcctcgcctactttttaaaacattttcctccctcctatatcctcctcctccacccgcatcctccacacttactactgatgactttgctacattcttctgcaccaaaactgcaaaaatcagtgctcaatttgctgcacctacaacaaacacgcaagatacaacaccaacaccacacacactcacctctttttctcagctctctgagtctgaggtgtccaaacttgtgctatctagccatgcaaccacctgtccactcgatcccattccctctcatctcttgcaagccatctctcctgcagtcataccaacactgactcacataattaacacatctcttgactctggtttattccccactacatttaagcaggctagggtaaccccactgctaaagaaacccaacctggaccatacgctacttgaaaactacagaccagtatccctgcttccattcatggccaagattctggagaaagtagtgttcaatcaagtcctggactttcttactcaaaacaatctcatggacaacaagcaatccggctttaagaaaggccactcaactgagactgccctgctctcggtcgtggaggatctcagactggctaaagcagactctaaatcatcagtcctcattttgctggacttgtcagctgcttttgacactgtcaaccaccagatcctgctatctacgcttgagtcactgggcgttgcgggcactgttatacaatggtttagatcttacctctctgacaggtcattcagggtgtcttggaggggagaggtgtccaacctacagcatctaaacactggggtacctcaaggctctgttcttgggccacttctcttctccatctacacatcatctctaggaccagtcatccagagacatggattctcctaccactgctatgctgatgacacccagctatacctctcttttcatcctgatgatccctcggttccagctcgtatctcagcctgcctgttggatatttcacactggatgaaagatcatcatcttcagctgaacctcgcaaaaacggaaatgcttgtagtttctgccaacccgactctacaccataacttttcaatccagatggatggggcaaccattactgcatccaaaatggtgaaaagccttggagtaacgattgatgaccaactaaacttctctgaccacatttctagaactgctcgatcgtgcagatttgcactctataacatcagaaagatccgacccttcttatctgaacatgcagctcaactccttgttcaagctcttgttctctccaaactggattactgcaactctctactagctttgcttccagctaactctatcaagcctcttcaactgctccagaatgcagcagcacgagttgtcttcaatgaacctaaacgagcacatgtcactccgctgctagtccgtttgcactggctgccagttgctgctcgcatcaaattcaaaactctgatgtttgcctacaaagtgacttctggcctagcaccttcttatctgcactcacttctgcagatctatgtgccctccagaaacttgcgttctgtgaatgaacgtcgcctcgtggttccatcccaaagagggaaaaaatcactttcgcgaacgctcacgctcaatctgcccagttggtggaatgaactccctaactgcatcagaacagcagagtcactcgctattttcaagaaacgactaaaaactcaactatttagtctccacttcacttcctaagctgcaattgcctctttgaatatcacactaattgtacaaaaaaaaaaaaaaaaaaaaaaaaaactactaacacttcccttcttagactttacagaccgcggcctactcggatccgcgatgatgatcagacatgataagatacattgatgagtttggacaaaccacaactagaatgcagtgaaaaaaatgctttatttgtgaaatttgtgatgctattgctttatttgtaaccattataagctgcaataaacaagttaacaacaacaaaaaaaaaaaaaaaaaaaaatttaaatgcgcgcatcatcggatgccgggaccgacgagtgcagaggcgtgcaagcgagcttggcgtaatcatggtcatagctgtttcctgtgtgaaattgttatccgctcacaattccacacaacatacgagccggaagcataaagtgtaaagcctggggtgcctaatgagtgagctaactcacattaattgcgttgcgctcactgcccgctttccagtcgggaaacctgtcgtgccagctgcattaatgaatcggccaacgcgcggggagaggcggtttgcgtattgggcgctcttccgcttcctcgctcactgactcgctgcgctcggtcgttcggctgcggcgagcggtatcagctcactcaaaggcggtaatacggttatccacagaatcaggggataacgcaggaaagaacatgtgagcaaaaggccagcaaaaggccaggaaccgtaaaaaggccgcgttgctggcgtttttccataggctccgcccccctgacgagcatcacaaaaatcgacgctcaagtcagaggtggcgaaacccgacaggactataaagataccaggcgtttccccctggaagctccctcgtgcgctctcctgttccgaccctgccgcttaccggatacctgtccgcctttctcccttcgggaagcgtggcgctttctcatagctcacgctgtaggtatctcagttcggtgtaggtcgttcgctccaagctgggctgtgtgcacgaaccccccgttcagcccgaccgctgcgccttatccggtaactatcgtcttgagtccaacccggtaagacacgacttatcgccactggcagcagccactggtaacaggattagcagagcgaggtatgtaggcggtgctacagagttcttgaagtggtggcctaactacggctacactagaagaacagtatttggtatctgcgctctgctgaagccagttaccttcggaaaaagagttggtagctcttgatccggcaaacaaaccaccgctggtagcggtggtttttttgtttgcaagcagcagattacgcgcagaaaaaaaggatctcaagaagatcctttgatcttttctacggggtctgacgctcagtggaacgaaaactcacgttaagggattttggtcatgagattatcaaaaaggatcttcacctagatccttttaaattaaaaatgaagttttaaatcaatctaaagtatatatgagtaaacttggtctgacagttaccaatgcttaatcagtgaggcacctatctcagcgatctgtctatttcgttcatccatagttgcctgactccccgtcgtgtagataactacgatacgggagggcttaccatctggccccagtgctgcaatgataccgcgagacccacgctcaccggctccagatttatcagcaataaaccagccagccggaagggccgagcgcagaagtggtcctgcaactttatccgcctccatccagtctattaattgttgccgggaagctagagtaagtagttcgccagttaatagtttgcgcaacgttgttgccattgctacaggcatcgtggtgtcacgctcgtcgtttggtatggcttcattcagctccggttcccaacgatcaaggcgagttacatgatcccccatgttgtgcaaaaaagcggttagctccttcggtcctccgatcgttgtcagaagtaagttggccgcagtgttatcactcatggttatggcagcactgcataattctcttactgtcatgccatccgtaagatgcttttctgtgactggtgagtactcaaccaagtcattctgagaatagtgtatgcggcgaccgagttgctcttgcccggcgtcaatacgggataataccgcgccacatagcagaactttaaaagtgctcatcattggaaaacgttcttcggggcgaaaactctcaaggatcttaccgctgttgagatccagttcgatgtaacccactcgtgcacccaactgatcttcagcatcttttactttcaccagcgtttctgggtgagcaaaaacaggaaggcaaaatgccgcaaaaaagggaataagggcgacacggaaatgttgaatactcatactcttcctttttcaatattattgaagcatttatcagggttattgtctcatgagcggatacatatttgaatgtatttagaaaaataaacaaataggggttccgcgcacatttccccgaaaagtgccacctgacgtctaagaaaccattattatcatgacattaacctataaaaataggcgtatcacgaggccctttcgtc

SEQ ID NO: 49 - protein, 965 aa, Danio rerio; identical to SEQ ID NO: 45

SEQ ID NO: 50 - DNA, 5139 bp, synthetic construct
  source 1..5139: mol_type = other DNA
tgcagggtcgactaatacgactcactatagggagagatatccctagctagttcaccgcggcagcggtcgcggcagcctcgtgtgaagaccgacgagggtaaagaccatcgactctacctgcgcgactccaccgagcaaagacaccgacaaagcacttgagtactttactttattgttttactttacacttattttttgttgtcagtgcacttttattatgtgttttctaattcctgttgttactaacactcgcaaaacacgggaggtacgctgcaagcgtaatcctcacaaccttcgttcaatacatgtatctactatttcacaactctctctctccgtgggcctctggaattgtcaatcagctgttaacaaggctgattttattacctccatagctacatattctgactataatctcatggctctaactgagacctggttgaggccggaggacactgctacacatgctactctttctgctaatttctctttttcccacactcctcgtcagacagggagagggggtgggactggactactaatttccaaagaatggaaatttactctgataccgtccctgccaacaatcagctcctttgaattccatgcagtcaccattatccaccccttctacataaatgtggttgtcatctaccgcccaccaggtaaattaggtcacttcctagatgaactggatgttcttctctcatctttttctaattttgacactcccttattggtgctaggtgacttcaacatttacgttgacaaaccgcaagctgcagactttcagactttgcttgcctcttttgacctaaaaagagcacctacttctgctacccacaaatcaggtaatcagctagaccttatttacacacgacactgcttcactgatcaaacaatagtaactccactacaaatatctgatcatttccttctgtctctcaacatccacattactcctgagccgccacacactcctacactggttacctttcgcagaaacctacgatctctctcacccaatagactatccaccattgtttcagactctcttcctccatctcgcaaactcactgcacttgattcgaacagtgccactaatacactctgctccacactagcatcatgtctagaccgattatgtcctcttgcatccaggccagcccgtgccagtcctcctgcaccctggctctcggatgctctccgtgagcatcgctcaaaacttcgggctgcggagagaatttggcggaaaactaaaaatcctgcacatctcttaacataccaaactcttctgtcctctttctcagctgaggttacttctgcaaagcagacgtattaccgtctgaaaatcaacaatgccactaatcctcgcctactttttaaaacattttcctccctcctatatcctcctcctccacccgcatcctccacacttactactgatgactttgctacattcttctgcaccaaaactgcaaaaatcagtgctcaatttgctgcacctacaacaaacacgcaagatacaacaccaacaccacacacactcacctctttttctcagctctctgagtctgaggtgtccaaacttgtgctatctagccatgcaaccacctgtccactcgatcccattccctctcatctcttgcaagccatctctcctgcagtcataccaacactgactcacataattaacacatctcttgactctggtttattccccactacatttaagcaggctagggtaaccccactgctaaagaaacccaacctggaccatacgctacttgaaaactacagaccagtatccctgcttccattcatggccaagattctggagaaagtagtgttcaatcaagtcctggactttcttactcaaaacaatctcatggacaacaagcaatccggctttaagaaaggccactcaactgagactgccctgctctcggtcgtggaggatctcagactggctaaagcagactctaaatcatcagtcctcattttgctggacttgtcagctgcttttgacactgtcaaccaccagatcctgctatctacgcttgagtcactgggcgttgcgggcactgttatacaatggtttagatcttacctctctgacaggtcattcagggtgtcttggaggggagaggtgtccaacctacagcatctaaacactggggtacctcaaggctctgttcttgggccacttctcttctccatctacacatcatctctaggaccagtcatccagagacatggattctcctaccactgctatgctgatgacacccagctatacctctcttttcatcctgatgatccctcggttccagctcgtatctcagcctgcctgttggatatttcacactggatgaaagatcatcatcttcagctgaacctcgcaaaaacggaaatgcttgtagtttctgccaacccgactctacaccataacttttcaatccagatggatggggcaaccattactgcatccaaaatggtgaaaagccttggagtaacgattgatgaccaactaaacttctctgaccacatttctagaactgctcgatcgtgcagatttgcactctataacatcagaaagatccgacccttcttatctgaacatgcagctcaactccttgttcaagctcttgttctctccaaactggattactgcaactctctactagctttgcttccagctaactctatcaagcctcttcaactgctccagaatgcagcagcacgagttgtcttcaatgaacctaaacgagcacatgtcactccgctgctagtccgtttgcactggctgccagttgctgctcgcatcaaattcaaaactctgatgtttgcctacaaagtgacttctggcctagcaccttcttatctgcactcacttctgcagatctatgtgccctccagaaacttgcgttctgtgaatgaacgtcgcctcgtggttccatcccaaagagggaaaaaatcactttcgcgaacgctcacgctcaatctgcccagttggtggaatgaactccctaactgcatcagaacagcagagtcactcgctattttcaagaaacgactaaaaactcaactatttagtctccacttcacttcctaagctgcaattgcctctttgaatatcacactaattgtacaaaaaaaaaaaaaaaaaaaaaaaaaactactaacacttcccttcttagactttacagaccgcggcctactcgacggatcgatccgaacaaacgacccaacacccgtgcgttttattctgtctttttattgccgatcccctcagaagaactcgtcaagaaggcgatagaaggcgatgcgctgcgaatcgggagcggcgataccgtaaagcacgaggaagcggtcagcccattcgccgccaagctcttcagcaatatcacgggtagccaacgctatgtcctgatagcggtcggccgctttacttgtacagctcgtccatgccgagagtgatcccggcggcggtcacgaactccagcaggaccatgtgatcgcgcttctcgttggggtctttgctcagggcggactgggtgctcaggtagtggttgtcgggcagcagcacggggccgtcgccgatgggggtgttctgctggtagtggtcggccagctgcacgctgccgtcctcgatgttgtggcggatcttgaagttcaccttgatgccgttcttctgcttgtcggccatgatatagacgttgtggctgttgtagttgtactccagcttgtgccccaggatgttgccgtcctccttgaagtcgatgcccttcagctcgatgcggttcaccagggtgtcgccctcgaacttcacctcggcgcgggtcttgtagttgccgtcgtccttgaagaagatggtgcgctcctggacgtagccttcgggcatggcggacttgaagaagtcgtgctgcttcatgtggtcggggtagcggctgaagcactgcacgccgtaggtcagggtggtcacgagggtgggccagggcacgggcagcttgccggtggtgcagatgaacttcagggtcagcttgccgtaggtggcatcgccctcgccctcgccggacacgctgaacttgtggccgtttacgtcgccgtccagctcgaccaggatgggcaccaccccggtgaacagctcctcgcccttgctcaccatggtggcgaattcgaagcttgagctcgagatctgagtccggtagcgctagcggatctgacggttcactaaaccagctctgcttatatagacctcccaccgtacacgcctaccgcccatttgcgtcaatggggcggagttgttacgacattttggaaagtcccgttgattttggtgccaaaacaaactcccattgacgtcaatggggtggagacttggaaatccccgtgagtcaaaccgctatccacgcccattgatgtactgccaaaaccgcatcaccatggtaatagcgatgactaatacgtagatgtactgccaagtaggaaagtcccataaggtcatgtactgggcataatgccaggcgggccatttaccgtcattgacgtcaatagggggcgtacttggcatatgatacacttgatgtactgccaagtgggcagtttaccgtaaatactccacccattgacgtcaatggaaagtccctattggcgttactatgggaacatacgtcattattgacgtcaatgggcgggggtcgttgggcggtcagccaggcgggccatttaccgtaagttatgtaacgcggaactccatatatgggctatgaactaatgaccccgtaattgattactattaaattcctgcaggtttgggtgaaacttgcctttagtacttattcattgttgctcttagttgtgtaaattgcttccttgtcctcatttgtaagtcgctttggataaaagcgtctgctaaatgactaaatgtaaatgtaaatgtaaaggatccgcgatgatgatcagacatgataagatacattgatgagtttggacaaaccacaactagaatgcagtgaaaaaaatgctttatttgtgaaatttgtgatgctattgctttatttgtaaccattataagctgcaataaacaagttaacaacaacaaaaaaaaaaaaaaaaaaaaatttaaatgcgcgcatc

SEQ ID NO: 51 - protein, 965 aa, Danio rerio; identical to SEQ ID NO: 45

SEQ ID NO: 52 - DNA, 3417 bp, synthetic construct
  source 1..3417: mol_type = other DNA
tgcagggtcgactaatacgactcactatagggagagatatccctagctagttcaccgcggcagcggtcgcggcagcctcgtgtgaagaccgacgagggtaaagaccatcgactctacctgcgcgactccaccgagcaaagacaccgacaaagcacttgagtactttactttattgttttactttacacttattttttgttgtcagtgcacttttattatgtgttttctaattcctgttgttactaacactcgcaaaacacgggaggtacgctgcaagcgtaatcctcacaaccttcgttcaatacatgtatctactatttcacaactctctctctccgtgggcctctggaattgtcaatcagctgttaacaaggctgattttattacctccatagctacatattctgactataatctcatggctctaactgagacctggttgaggccggaggacactgctacacatgctactctttctgctaatttctctttttcccacactcctcgtcagacagggagagggggtgggactggactactaatttccaaagaatggaaatttactctgataccgtccctgccaacaatcagctcctttgaattccatgcagtcaccattatccaccccttctacataaatgtggttgtcatctaccgcccaccaggtaaattaggtcacttcctagatgaactggatgttcttctctcatctttttctaattttgacactcccttattggtgctaggtgacttcaacatttacgttgacaaaccgcaagctgcagactttcagactttgcttgcctcttttgacctaaaaagagcacctacttctgctacccacaaatcaggtaatcagctagaccttatttacacacgacactgcttcactgatcaaacaatagtaactccactacaaatatctgatcatttccttctgtctctcaacatccacattactcctgagccgccacacactcctacactggttacctttcgcagaaacctacgatctctctcacccaatagactatccaccattgtttcagactctcttcctccatctcgcaaactcactgcacttgattcgaacagtgccactaatacactctgctccacactagcatcatgtctagaccgattatgtcctcttgcatccaggccagcccgtgccagtcctcctgcaccctggctctcggatgctctccgtgagcatcgctcaaaacttcgggctgcggagagaatttggcggaaaactaaaaatcctgcacatctcttaacataccaaactcttctgtcctctttctcagctgaggttacttctgcaaagcagacgtattaccgtctgaaaatcaacaatgccactaatcctcgcctactttttaaaacattttcctccctcctatatcctcctcctccacccgcatcctccacacttactactgatgactttgctacattcttctgcaccaaaactgcaaaaatcagtgctcaatttgctgcacctacaacaaacacgcaagatacaacaccaacaccacacacactcacctctttttctcagctctctgagtctgaggtgtccaaacttgtgctatctagccatgcaaccacctgtccactcgatcccattccctctcatctcttgcaagccatctctcctgcagtcataccaacactgactcacataattaacacatctcttgactctggtttattccccactacatttaagcaggctagggtaaccccactgctaaagaaacccaacctggaccatacgctacttgaaaactacagaccagtatccctgcttccattcatggccaagattctggagaaagtagtgttcaatcaagtcctggactttcttactcaaaacaatctcatggacaacaagcaatccggctttaagaaaggccactcaactgagactgccctgctctcggtcgtggaggatctcagactggctaaagcagactctaaatcatcagtcctcattttgctggacttgtcagctgcttttgacactgtcaaccaccagatcctgctatctacgcttgagtcactgggcgttgcgggcactgttatacaatggtttagatcttacctctctgacaggtcattcagggtgtcttggaggggagaggtgtccaacctacagcatctaaacactggggtacctcaaggctctgttcttgggccacttctcttctccatctacacatcatctctaggaccagtcatccagagacatggattctcctaccactgctatgctgatgacacccagctatacctctcttttcatcctgatgatccctcggttccagctcgtatctcagcctgcctgttggatatttcacactggatgaaagatcatcatcttcagctgaacctcgcaaaaacggaaatgcttgtagtttctgccaacccgactctacaccataacttttcaatccagatggatggggcaaccattactgcatccaaaatggtgaaaagccttggagtaacgattgatgaccaactaaacttctctgaccacatttctagaactgctcgatcgtgcagatttgcactctataacatcagaaagatccgacccttcttatctgaacatgcagctcaactccttgttcaagctcttgttctctccaaactggattactgcaactctctactagctttgcttccagctaactctatcaagcctcttcaactgctccagaatgcagcagcacgagttgtcttcaatgaacctaaacgagcacatgtcactccgctgctagtccgtttgcactggctgccagttgctgctcgcatcaaattcaaaactctgatgtttgcctacaaagtgacttctggcctagcaccttcttatctgcactcacttctgcagatctatgtgccctccagaaacttgcgttctgtgaatgaacgtcgcctcgtggttccatcccaaagagggaaaaaatcactttcgcgaacgctcacgctcaatctgcccagttggtggaatgaactccctaactgcatcagaacagcagagtcactcgctattttcaagaaacgactaaaaactcaactatttagtctccacttcacttcctaagctgcaattgcctctttgaatatcacactaattgtacaaaaaaaaaaaaaaaaaaaaaaaaaactactaacacttcccttcttagactttacagaccgcggcctactcggatccgcgatgatgatcagacatgataagatacattgatgagtttggacaaaccacaactagaatgcagtgaaaaaaatgctttatttgtgaaatttgtgatgctattgctttatttgtaaccattataagctgcaataaacaagttaacaacaacaaaaaaaaaaaaaaaaaaaaatttaaatgcgcgcatc

SEQ ID NO: 53 - DNA, 2060 bp, synthetic construct
  source 1..2060: mol_type = other DNA
tgcagggtcgactaatacgactcactatagggagagataattgcctctttgaatatcacactaattgtacaaaaaaaaaaaaaaaaaaaaaaaaaactactaacacttcccttcttagactttacagaccgcggcctactcgacggatcgatccgaacaaacgacccaacacccgtgcgttttattctgtctttttattgccgatcccctcagaagaactcgtcaagaaggcgatagaaggcgatgcgctgcgaatcgggagcggcgataccgtaaagcacgaggaagcggtcagcccattcgccgccaagctcttcagcaatatcacgggtagccaacgctatgtcctgatagcggtcggccgctttacttgtacagctcgtccatgccgagagtgatcccggcggcggtcacgaactccagcaggaccatgtgatcgcgcttctcgttggggtctttgctcagggcggactgggtgctcaggtagtggttgtcgggcagcagcacggggccgtcgccgatgggggtgttctgctggtagtggtcggccagctgcacgctgccgtcctcgatgttgtggcggatcttgaagttcaccttgatgccgttcttctgcttgtcggccatgatatagacgttgtggctgttgtagttgtactccagcttgtgccccaggatgttgccgtcctccttgaagtcgatgcccttcagctcgatgcggttcaccagggtgtcgccctcgaacttcacctcggcgcgggtcttgtagttgccgtcgtccttgaagaagatggtgcgctcctggacgtagccttcgggcatggcggacttgaagaagtcgtgctgcttcatgtggtcggggtagcggctgaagcactgcacgccgtaggtcagggtggtcacgagggtgggccagggcacgggcagcttgccggtggtgcagatgaacttcagggtcagcttgccgtaggtggcatcgccctcgccctcgccggacacgctgaacttgtggccgtttacgtcgccgtccagctcgaccaggatgggcaccaccccggtgaacagctcctcgcccttgctcaccatggtggcgaattcgaagcttgagctcgagatctgagtccggtagcgctagcggatctgacggttcactaaaccagctctgcttatatagacctcccaccgtacacgcctaccgcccatttgcgtcaatggggcggagttgttacgacattttggaaagtcccgttgattttggtgccaaaacaaactcccattgacgtcaatggggtggagacttggaaatccccgtgagtcaaaccgctatccacgcccattgatgtactgccaaaaccgcatcaccatggtaatagcgatgactaatacgtagatgtactgccaagtaggaaagtcccataaggtcatgtactgggcataatgccaggcgggccatttaccgtcattgacgtcaatagggggcgtacttggcatatgatacacttgatgtactgccaagtgggcagtttaccgtaaatactccacccattgacgtcaatggaaagtccctattggcgttactatgggaacatacgtcattattgacgtcaatgggcgggggtcgttgggcggtcagccaggcgggccatttaccgtaagttatgtaacgcggaactccatatatgggctatgaactaatgaccccgtaattgattactattaaattcctgcaggtttgggtgaaacttgcctttagtacttattcattgttgctcttagttgtgtaaattgcttccttgtcctcatttgtaagtcgctttggataaaagcgtctgctaaatgactaaatgtaaatgtaaatgtaaaggatccgcgatgatgatcagacatgataagatacattgatgagtttggacaaaccacaactagaatgcagtgaaaaaaatgctttatttgtgaaatttgtgatgctattgctttatttgtaaccattataagctgcaataaacaagttaacaacaacaaaaaaaaaaaaaaaaaaaaatttaaatgcgcgcatcatc

SEQ ID NO: 54 - protein, 7 aa, synthetic construct
PKKKRKV

SEQ ID NO: 55 - protein, 16 aa, synthetic construct
KRPAATKKAGQAKKKK

SEQ ID NO: 56 - protein, 18 aa, synthetic construct
KRTADGSEFESPKKKRKV

SEQ ID NO: 57 - protein, 8 aa, synthetic construct
PKKRRKKK

SEQ ID NO: 58 - protein, 7 aa, synthetic construct
RRRRRRR

SEQ ID NO: 59 - protein, 8 aa, synthetic construct
KKRKRSRK

SEQ ID NO: 60 - DNA, 126 bp, synthetic construct
  source 1..126: mol_type = other DNA
tgaaacttgcctttagtacttattcattgttgctcttagttgtgtaaattgcttccttgtcctcatttgtaagtcgctttggataaaagcgtctgctaaatgactaaatgtaaatgtaaatgtaaa

SEQ ID NO: 61 - DNA, 89 bp, synthetic construct
  source 1..89: mol_type = other DNA
ggatcctgaccatttatgtgaagctgctttgacacaatctacattgtaaaagcgctatacaaataaagctgaattgaattgaattgaat

SEQ ID NO: 62 - DNA, 243 bp, synthetic construct
  source 1..243: mol_type = other DNA
cacttgtatttgtctttgtcctaatactgtagcttactcttctgcctagttggctttgcacaggttaggttagaatagtgttcactgtgtgaactgtgttcttagctagaaatagctgtacaaaataagtattatacctttctgaacttgtgttcagcagatgcctacgaccatgatatgcacttttgtacgtcgctttggataaaagcgtctgcgaaataaatgtaatgtaatgtaatgtaa

SEQ ID NO: 63 - DNA, 88 bp, synthetic construct
  source 1..88: mol_type = other DNA
ttgcttgtgatttcttttcttttttattttatttccattatttgaaatgtatttgctgtaccaatgcttttgacacgaaataaataaa

SEQ ID NO: 64 - DNA, 185 bp, synthetic construct
  source 1..185: mol_type = other DNA
agagatatccctagctagttcaccgcggcagcggtcgcggcagcctcgtgtgaagaccgacgagggtaaagaccatcgactctacctgcgcgactccaccgagcaaagacaccgacaaagcacttgagtactttactttattgttttactttacacttattttttgttgtcagtgcacttttatt

SEQ ID NO: 65 - DNA, 118 bp, synthetic construct
  source 1..118: mol_type = other DNA
gcggccgctcgagcatccgcctgttgtttgtagctttagcctgctagcgccgctggtcagctaaagctaccgacctctttaaccatacacttactggctttgctctttaccccgtaaa

SEQ ID NO: 66 - DNA, 443 bp, synthetic construct
  source 1..443: mol_type = other DNA
tcgacccactaccaggggagtcaggagaggtgcagacgtggcatcagtgtgcatctgattgtgtcgtcgcttctgccgtcccccgcgattcagataagcgtatcttaacttgatttgtctctgctgttgctagttagagaacatagttgtgcgtaatttagataatcttttttaaacgtgtctttactgttgctagtcagcgaacttagttgtgcgttagctgagaatctctgtagttgactcactgttgttagttagttaaacgcgttagtgaaactgtgtgtgggggttggtgtttaactgcccggtattgttgagctaatttcaagtagcttcacctggtgcttatctgccttaatgaaggtgatgcaagcacgtaattgtcacccggtatttatagctccagcggaggctgccataggcagcctcgtcgtcagtttgtg

SEQ ID NO: 67 - DNA, 109 bp, synthetic construct
  source 1..109: mol_type = other DNA
gggggacacggaaagagcctccccgaagattgagtgaattcagtcgggcgtcccctgggcaacgtttcttgtaagcggccgatctttccaccccaaaagcattggatga

SEQ ID NO: 68 - DNA, 134 bp, synthetic construct
  source 1..134: mol_type = other DNA
gctcgctttcttgctgtccaatttctattaaaggttcctttgttccctaagtccaactactaaactgggggatattatgaagggccttgagcatctggattctgcctaataaaaaacatttattttcattgcaa

SEQ ID NO: 69 - DNA, 111 bp, synthetic construct
  source 1..111: mol_type = other DNA
gctggagcctcggtggccatgcttcttgccccttgggcctccccccagcccctcctccccttcctgcacccgtacccccgtggtctttgaataaagtctgagtgggcggca

SEQ ID NO: 70 - protein, 982 aa, synthetic construct
MDEYQRSLSRPLLTIMSINIEGLSLAKEELLAKMSEDISCDILCIQETHRDITMRRPKILGMQLAVERPHRQYGSAIFVRSGVAISATSLTEVNNIEILSVELDSCTVSSLYKPPGADFYFTPPTSCHNHEAHFVVGDFNSHSCVWGYDEDDRNGEAVLTWADNSRMSLLHDSKLPPSFNSGRWKRGYNPDLIFVKESISHQCTKRVLNPIPNTQHRPICCVAYAAVRPKSVPFRRRFNFNKANWTKFTETLEAAISDIEPSIENYDLFVEAVKRSSRLSIPRGCRTSYLPGLNEESLNQLQEYLRLFQENPYSDGTIAAGQKLSTALANAKKDRWIELLENLDMSKSSRKAWQLLRRLDSDPLVNPGHANVTPDQIAHQLIQNGKTNCSRIKMKINRVPELETHQLSSPLNLKELREAIKRCKTGKAPGLDDLMMEQIKHLGPKAENWLLKFYNQCLAHKQIPRAWRKTKIIAILKPGKDASNARNYRPISLLCHLYKVYERMLLNRLGPVIEPKLIAQQAGFRPGKNCTGQILHLTEHIEEGYEKGCITGTVFVDLTAAYDTVQHRKMLHKVYHITRDFDFTKTVQTLLENRSFYVEFQGQKSRWRRQKNGLPQGSVLAPTLFNIFTNDQPQPPLTKSFIYADDLGLTTQAKDFETVEKQLTNALKDLSSYYKENHLKPNPAKTQVCAFHLRNREANRKLKVTWEGQELEHCFHPKYLGVTLDRTLTYRKHCMNTKHKVAARNNILRKLTGSAWGADPQVIRTSALALSFSTAEYACPVWHKSAHAKQVDIALNETCRIITGCLKPTPVDKLYKLAGIAPPDVRREVAANGERKKVEHCESHPLHGYHPPPTRLKSRKGFMRTTTPLDVPPAAARVSLWAAKPGNSNWMAPQEGLPPGANQEWATWKSLNRLRSGVGRSKDNLARWGYLEESSTLCDCGAEQTTQHMYACPQCPASCTEEELFKATDNAVAVARFWSKTI

SEQ ID NO: 71 - protein, 982 aa, synthetic construct
MDEYQRSLSRPLLTIMSINIEGLSLAKEELLAKMSEDISCDILCIQETHRDITMRRPKILGMQLAVERPHRQYGSAIFVRSGVAISATSLTEVNNIEILSVELDSCTVSSLYKPPGADFYFTPPTSCHNHEAHFVVGDFNSHSCVWGYDEDDRNGEAVLTWADNSRMSLLHDSKLPPSFNSGRWKRGYNPDLIFVKESISHQCTKRVLNPIPNTQHRPICCVAYAAVRPKSVPFRRRFNFNKANWTKFTETLEAAISDIEPSIENYDLFVEAVKRSSRLSIPRGCRTSYLPGLNEESLNQLQEYLRLFQENPYSDGTIAAGQKLSTALANAKKDRWIELLENLDMSKSSRKAWQLLRRLDSDPLVNPGHANVTPDQIAHQLIQNGKTNCSRIKMKINRVPELETHQLSSPLNLKELREAIKRCKTGKAPGLDDLMMEQIKHLGPKAENWLLKFYNQCLAHKQIPRAWRKTKIIAILKPGKDASNARNYRPISLLCHLYKVYERMLLNRLGPVIEPKLIAQQAGFRPGKNCTGQILHLTEHIEEGYEKGCITGTVFVDLTAAYDTVQHRKMLHKVYHITRDFDFTKTVQTLLENRSFYVEFQGQKSRWRRQKNGLPQGSVLAPTLFNIFTNDQPLPPLTKSFIYADDLGLTTQAKDFETVEKQLTNALKDLSSYYKENHLKPNPAKTQVCAFHLRNREANRKLKVTWEGQELEHCFHPKYLGVTLDRTLTYRKHCMNTKHKVAARNNILRKLTGSAWGADPQVIRTSALALSFSTAEYACPVWHKSAHAKQVDIALNETCRIITGCLKPTPVDKLYKLAGIAPPDVRREVAANGERKKVEHCESHPLHGYHPPPTRLKSRKGFMRTTTPLDVPPAAARVSLWAAKPGNSNWMAPQEGLPPGANQEWATWKSLNRLRSGVGRSKDNLARWHYLEESSTLCDCGAEQTTQHMYACPQCPASCTEEELFKATDNAVAVARFWSKTI

SEQ ID NO: 72 - protein, 982 aa, synthetic construct
MDEYQRSLSRPLLTIMSINIEGLSLAKEELLAKMSEDISCDILCIQETHRDITMRRPKILGMQLAVERPHRQYGSAIFVRSGVAISATSLTEVNNIEILSVELDSCTVSSLYKPPGADFYFTPPTSCHNHEAHFVVGDFNSHSCVWGYDEDDRNGEAVLTWADNSRMSLLHDSKLPPSFNSGRWKRGYNPDLIFVKESISHQCTKRVLNPIPNTQHRPICCVAYAAVRPKSVPFRRRFNFNKANWTKFTETLEAAISDIEPSIENYDLFVEAVKRSSRLSIPRGCRTSYLPGLNEESLNQLQEYLRLFQENPYSDGTIAAGQKLSTALANAKKDRWIELLENLDMSKSSRKAWQLLRRLDSDPLVNPGHANVTPDQIAHQLIQNGKTNCSRIKMKINRVPELETHQLSSPLNLKELREAIKRCKTGKAPGLDDLMMEQIKHLGPKAENWLLKFYNQCLAHKQIPRAWRKTKIIAILKPGKDASNARNYRPISLLCHLYKVYERMLLNRLGPVIEPKLIAQQAGFRPGKNCTGQILHLTEHIEEGYEKGCITGTVFVDLTAAYDTVQHRKMLHKVYHITRDFDFTKTVQTLLENRSFYVEFQGQKSRWRRQKNGLPQGSVLAPTLFNIFTNDQPQPPLTKSFIYADDLGLTTQAKDFETVEKQLTNALKDLSSYYKENHLKPNPSKTQVCAFHLRNREANRKLKVTWEGQELEHCFHPKYLGVTLDRTLTYRKHCMNTKHKVAARNNILRKLTGSAWGADPQVIRTSALALSFSTAEYACPVWHKSAHAKQVDIALNETCRIITGCLKPTPVDKLYKLAGIAPPDVRREVAANGERKKVEHCESHPLHGYHPPPTRLKSRKGFMRTTTPLDVPPAAARVSLWAAKPGNSNWMAPQEGLPPGANQEWATWKSLNRLRSGVGRSKDNLARWHYLEESSTLCDCGAEQTTQHMYACPQCPASCTEEELFKATDNAVAVARFWSKTI

SEQ ID NO: 73 - protein, 982 aa, synthetic construct
MDEYQRSLSRPLLTIMSINIEGLSLAKEELLAKMSEDISCDILCIQETHRDITMRRPKILGMQLAVERPHRQYGSAIFVRSGVAISATSLTEVNNIEILSVELDSCTVSSLYKPPGADFYFTPPTSCHNHEAHFVVGDFNSHSCVWGYDEDDRNGEAVLTWADNSRMSLLHDSKLPPSFNSGRWKRGYNPDLIFVKESISHQCTKRVLNPIPNTQHRPICCVAYAAVRPKSVPFRRRFNFNKANWTKFTETLEAAISDIEPSIENYDLFVEAVKRSSRLSIPRGCRTSYLPGLNEESLNQLQEYLRLFQENPYSDGTIAAGQKLSTALANAKKDRWIELLENLDMSKSSRKAWQLLRRLDSDPLVNPGHANVTPDQIAHQLIQNGKTNCSRIKMKINRVPELETHQLSSPLNLKELREAIKRCKTGKAPGLDDLMMEQIKHLGPKAENWLLKFYNQCLAHKQIPRAWRKTKIIAILKPGKDASNARNYRPISLLCHLYKVYERMLLNRLGPVIEPKLIAQQAGFRPGKNCTGQILHLTEHIEEGYEKGCITGTVFVDLTAAYDTVQHRKMLHKVYHITRDFDFTKTVQTLLENRSFYVEFQGQKSRWRRQKNGLPQGSVLAPTLFNIFTNDQPQPPLTKSFIYADDLGLTTQAKDFETVEKQLTNALKDLSSYYKENHLKPNPAKTQVCAFHLRNREANRKLKVTWEGQELEHCFHPKYLGVTLDRTLTYRKHCMNTKHKVAARNNILRKLTGSAWGADPQVIRTSALALSFSTAEYACPVWHKSAHAKQVDIALNETCRIITGCLKPTPVDKLYKLAGIAPPDVRREVAANGERKKVEHCESHPLHGYHPPPTRLKSRKGFMRTTTPLDVPPAAARVSLWAAKPGNSNWMAPQEGLPPGANQEWATWKSLNRLRSGVGRSKDNLARWHYLEESSTLCDCGAEQTTQHMYACPQCPASCTEEELFKATDNAVAVARYWSKTI

SEQ ID NO: 74 - protein, 982 aa, synthetic construct
MDEYQRSLSRPLLTIMSINIEGLSLAKEELLAKMSEDISCDILCIQETHRDITMRRPKILGMQLAVERPHRQYGSAIFVRSGVAISATSLTEVNNIEILSVELDSCTVSSLYKPPGADFYFTPPTSCHNHEAHFVVGDFNSHSCVWGYDEDDRNGEAVLTWADNSRMSLLHDSKLPPSFNSGRWKRGYNPDLIFVKESISHQCTKRVLNPIPNTQHRPICCVAYAAVRPKSVPFRRRFNFNKANWTKFTETLEAAISDIEPSIENYDLFVEAVKRSSRLSIPRGCRTSYLPGLNEESLNQLQEYLRLFQENPYSDGTIAAGQKLSTALANAKKDRWIELLENLDMSKSSRKAWQLLRRLDSDPLVNPGHANVTPDQIAHQLIQNGKTNCSRIKMKINRVPELETHQLSSPLNLKELREAIKRCKTGKAPGLDDLMMEQIKHLGPKAENWLLKFYNQCLAHKQIPRAWRKTKIIAILKPGKDASNARNYRPISLLCHLYKVYERMLLNRLGPVIEPKLIAQQAGFRPGKNCTGQILHLTEHIEEGYEKGCITGTVFVDLTAAYDTVQHRKMLHKVYHITRDFDFTKTVQTLLENRSFYVEFQGQKSRWRRQKNGLPQGSVLAPTLFNIFTNDQPQPPLTKSFIYADDLGLTTQAKDFETVEKQLTNALKDLSSYYKENHLKPNPAKTQVCAFHLRNREANRKLKVTWEGQELEHCFHPKYLGVTLDRTLTYRKHCMNTKHKVAARNNILRKLTGSAWGADPQVIRTSALALSFSTAEYACPVWHKSAHAKQVDIALNETCRIITGCLKPTPVDKLYKLAGIAPPDVRREVAANGERKKVEHCESHPLHGYQPPPTRLKSRKGFMRTTTPLDVPPAAARVSLWAAKPGNSNWMAPQEGLPPGANQEWATWKSLNRLRSGVGRSKDNLARWHYLEESSTLCDCGAEQTTQHMYACPQCPASCTEEELFKATDNAVAVARFWSKTI

SEQ ID NO: 75 - protein, 982 aa, synthetic construct
MDEYQRSLSRPLLTIMSINIEGLSLAKEELLAKMSEDISCDILCIQETHRDITMRRPKILGMQLAVERPHRQYGSAIFVRSGVAISATSLTEVNNIEILSVELDSCTVSSLYKPPGADFYFTPPTSCHNHEAHFVVGDFNSHSCVWGYDEDDRNGEAVLTWADNSRMSLLHDSKLPPSFNSGRWKRGYNPDLIFVKESISHQCTKRVLNPIPNTQHRPICCVAYAAVRPKSVPFRRRYNFNKANWTKFTETLEAAISDIEPSIENYDLFVEAVKRSSRLSIPRGCRTSYLPGLNEESLNQLQEYLRLFQENPYSDGTIAAGQKLSTALANAKKDRWIELLENLDMSKSSRKAWQLLRRLDSDPLVNPGHANVTPDQIAHQLIQNGKTNCSRIKMKINRVPELETHQLSSPLNLKELREAIKRCKTGKAPGLDDLMMEQIKHLGPKAENWLLKFYNQCLAHKQIPRAWRKTKIIAILKPGKDASNARNYRPISLLCHLYKVYERMLLNRLGPVIEPKLIAQQAGFRPGKNCTGQILHLTEHIEEGYEKGCITGTVFVDLTAAYDTVQHRKMLHKVYHITRDFDFTKTVQTLLENRSFYVEFQGQKSRWRRQKNGLPQGSVLAPTLFNIFTNDQPQPPLTKSFIYADDLGLTTQAKDFETVEKQLTNALKDLSSYYKENHLKPNPAKTQVCAFHLRNREANRKLKVTWEGQELEHCFHPKYLGVTLDRTLTYRKHCMNTKHKVAARNNILRKLTGSAWGADPQVIRTSALALSFSTAEYACPVWHKSAHAKQVDIALNETCRIITGCLKPTPVDKLYKLAGIAPPDVRREVAANGERKKVEHCESHPLHGYHPPPTRLKSRKGFMRTTTPLDVPPAAARVSLWAAKPGNSNWMAPQEGLPPGANQEWATWKSLNRLRSGVGRSKDNLARWHYLEESSTLCDCGAEQTTQHMYACPQCPASCTEEELFKATDNAVAVARFWSKTI

SEQ ID NO: 76 - protein, 982 aa, synthetic construct
MDEYQRSLSRPLLTIMSINIEGLSLAKEELLAKMSEDISCDILCIQETHRDITMRRPKILGMQLAVERPHRQYGSAIFVRSGVAISATSLTEVNNIEILSVELDSCTVSSLYKPPGADFYFTPPTSCHNHEAHFVVGDFNSHSCVWGYDEDDRNGEAVLTWADNSRMSLLHDSKLPPSFNSGRWKRGYNPDLIFVKESISHQCTKRVLNPIPNTQHRPICCVAYAAVRPKSVPFRRRFNFNKANWTKFTETLEAAISDIEPSIENYDLFVEAVKRSSRLSIPRGCRTSYLPGLNEESLNQLQEYLRLFQENPYSDGTIAAGQKLSTALANAKKDRWIELLENLDMSKSSRKAWQLLRRLDSDPLVNPGHANVTPDQIAHQLIQNGKTNCSRIKMKINRVPELETHQLSSPLNLKELREAIKRCKTGKAPGLDDLMMEQIKHLGPKAENWLLKFYNQCLAHKQIPRAWRKTKIIAILKPGKDASNARNYRPISLLCHLYKVYERMLLNRLGPVIEPKLIAQQAGFRPGKNCTGQILHLTEHIEEGYEKGCITGTVFVDLTAAYDTVQHRKMLHKVYHITRDFDFTKTVQTLLENRSFYVEFQGQKSRWRRQKNGLPQGSVLAPTLFNIFTNDQPQPPLTKSFIYADDLGLTTQAKDFETVEKQLTNALKDLSSYYKENHLKPNPAKTQVCAFHLRNREANRKLKVTWEGQELEHCFHPKYLGVTLDRTLTYRKHCMNTKHKVAARNNILRKLTGSAWGADPQVIRTSALALSFSTAEYACPVWHKSAHAKQVDIALNETCRIITGCLKPTPVDKLYKLAGIAPPDVRREVAANGERKKVEHCESHPLHGYHPPPTRLKSRKGFMRTTTPLDVPPATARVSLWAAKPGNSNWMAPQEGLPPGANQEWATWKSLNRLRSGVGRSKDNLARWHYLEESSTLCDCGAEQTTQHMYACPQCPASCTEEELFKATDNAVAVARFWSKTI

SEQ ID NO: 77 - protein, 982 aa, synthetic construct
MDEYQRSLSRPLLTIMSINIEGLSLAKEELLAKMSEDISCDILCLQETHRDITMRRPKILGMQLAVERPHRQYGSAIFVRSGVAISATSLTEVNNIEILSVELDSCTVSSLYKPPGADFYFTPPTSCHNHEAHFVVGDFNSHSCVWGYDEDDRNGEAVLTWADNSRMSLLHDSKLPPSFNSGRWKRGYNPDLIFVKESISHQCTKRVLNPIPNTQHRPICCVAYAAVRPKSVPFRRRFNFNKANWTKFTETLEAAISDIEPSIENYDLFVEAVKRSSRLSIPRGCRTSYLPGLNEESLNQLQEYLRLFQENPYSDGTIAAGQKLSTALANAKKDRWIELLENLDMSKSSRKAWQLLRRLDSDPLVNPGHANVTPDQIAHQLIQNGKTNCSRIKMKINRVPELETHQLSSPLNLKELREAIKRCKTGKAPGLDDLMMEQIKHLGPKAENWLLKFYNQCLAHKQIPRAWRKTKIIAILKPGKDASNARNYRPISLLCHLYKVYERMLLNRLGPVIEPKLIAQQAGFRPGKNCTGQILHLTEHIEEGYEKGCITGTVFVDLTAAYDTVQHRKMLHKVYHITRDFDFTKTVQTLLENRSFYVEFQGQKSRWRRQKNGLPQGSVLAPTLFNIFTNDQPQPPLTKSFIYADDLGLTTQAKDFETVEKQLTNALKDLSSYYKENHLKPNPAKTQVCAFHLRNREANRKLKVTWEGQELEHCFHPKYLGVTLDRTLTYRKHCMNTKHKVAARNNILRKLTGSAWGADPQVIRTSALALSFSTAEYACPVWHKSAHAKQVDIALNETCRIITGCLKPTPVDKLYKLAGIAPPDVRREVAANGERKKVEHCESHPLHGYHPPPTRLKSRKGFMRTTTPLDVPPAAARVSLWAAKPGNSNWMAPQEGLPPGANQEWATWKSLNRLRSGVGRSKDNLARWHYLEESSTLCDCGAEQTTQHMYACPQCPASCTEEELFKATDNAVAVARFWSKTI

SEQ ID NO: 78 - protein, 982 aa, synthetic construct
MDEYQRSLSRPLLTIMSINIEGLSLAKEELLAKMSEDISCDILCIQETHRDITMRRPKILGMQLAVERPHRQYGSAIFVRSGVAISATSLTEVNNIEILSVELDSCTVSSLYKPPGADFYFTPPTSCHNHEAHFVVGDFNSHSCVWGYDEDDRNGEAVLTWADNSRMSLLHDSKLPPSFNSGRWKRGYNPDLIFVKESISHQCTKRVLNPIPNTQHRPICCVAYAAVRPKSVPFRRRFNFNKANWTKFTETLEAAISDIEPSIENYDLFVEAVKRSSRLSIPRGCRTSYLPGLNEESLNQLQEYLRLFQENPYSDGTIAAGQKLSTALANAKKDRWIELLENLDMSKSSRKAWQLLRRLDSDPLVNPGHANVTPDQIAHQLIQNGKTNCSRIKMKINRVPELETHQLSSPLNLKELREAIKRCKTGKAPGLDDIMMEQIKHLGPKAENWLLKFYNQCLAHKQIPRAWRKTKIIAILKPGKDASNARNYRPISLLCHLYKVYERMLLNRLGPVIEPKLIAQQAGFRPGKNCTGQILHLTEHIEEGYEKGCITGTVFVDLTAAYDTVQHRKMLHKVYHITRDFDFTKTVQTLLENRSFYVEFQGQKSRWRRQKNGLPQGSVLAPTLFNIFTNDQPQPPLTKSFIYADDLGLTTQAKDFETVEKQLTNALKDLSSYYKENHLKPNPAKTQVCAFHLRNREANRKLKVTWEGQELEHCFHPKYLGVTLDRTLTYRKHCMNTKHKVAARNNILRKLTGSAWGADPQVIRTSALALSFSTAEYACPVWHKSAHAKQVDIALNETCRIITGCLKPTPVDKLYKLAGIAPPDVRREVAANGERKKVEHCESHPLHGYHPPPTRLKSRKGFMRTTTPLDVPPAAARVSLWAAKPGNSNWMAPQEGLPPGANQEWATWKSLNRLRSGVGRSKDNLARWHYLEESSTLCDCGAEQTTQHMYACPQCPASCTEEELFKATDNAVAVARFWSKTI

SEQ ID NO: 79 - protein, 982 aa, synthetic construct
MDEYQRSLSRPLLTIMSINIEGLSLAKEELLAKMSEDISCDILCIQETHRDITMRRPKILGMQLAVERPHRQYGSAIFVRSGVAISATSLTEVNNIEILSVELDSCTVSSLYKPPGADFYFTPPTSCHNHEAHFVVGDFNSHSCVWGYDEDDRNGEAVLTWADNSRMSLLHDSKLPPSFNSGRWKRGYNPDLIFVKESISHQCTKRVLNPIPNTQHRPICCVAYAAVRPKSVPFRRRFNFNKANWTKFTETLEAAISDIEPSIENYDLFVEAVKRSSRLSIPRGCRTSYLPGLNEESLNQLQEYLRLFQENPYSDGTIAAGQKLSTALANAKKDRWIELLENLDMSKSSRKAWQLLRRLDSDPLVNPGHANVTPDQIAHQLIQNGKTNCSRIKMKINRVPELETHQLSSPLNLKELREAIKRCKTGKAPGLDDLMMEQLKHLGPKAENWLLKFYNQCLAHKQIPRAWRKTKIIAILKPGKDASNARNYRPISLLCHLYKVYERMLLNRLGPVIEPKLIAQQAGFRPGKNCTGQILHLTEHIEEGYEKGCITGTVFVDLTAAYDTVQHRKMLHKVYHITRDFDFTKTVQTLLENRSFYVEFQGQKSRWRRQKNGLPQGSVLAPTLFNIFTNDQPQPPLTKSFIYADDLGLTTQAKDFETVEKQLTNALKDLSSYYKENHLKPNPAKTQVCAFHLRNREANRKLKVTWEGQELEHCFHPKYLGVTLDRTLTYRKHCMNTKHKVAARNNILRKLTGSAWGADPQVIRTSALALSFSTAEYACPVWHKSAHAKQVDIALNETCRIITGCLKPTPVDKLYKLAGIAPPDVRREVAANGERKKVEHCESHPLHGYHPPPTRLKSRKGFMRTTTPLDVPPAAARVSLWAAKPGNSNWMAPQEGLPPGANQEWATWKSLNRLRSGVGRSKDNLARWHYLEESSTLCDCGAEQTTQHMYACPQCPASCTEEELFKATDNAVAVARFWSKTI

SEQ ID NO: 80 - protein, 982 aa, synthetic construct
MDEYQRSLSRPLLTIMSINIEGLSLAKEELLAKMSEDISCDILCIQETHRDITMRRPKILGMQLAVERPHRQYGSAIFVRSGVAISATSLTEVNNIEILSVELDSCTVSSLYKPPGADFYFTPPTSCHNHEAHFVVGDFNSHSCVWGYDEDDRNGEAVLTWADNSRMSLLHDSKLPPSFNSGRWKRGYNPDLIFVKESISHQCTKRVLNPIPNTQHRPICCVAYAAVRPKSVPFRRRFNFNKANWTKFTETLEAAISDIEPSIENYDLFVEAVKRSSRLSIPRGCRTSYLPGLNEESLNQLQEYLRLFQENPYSDGTIAAGQKLSTALANAKKDRWIELLENLDMSKSSRKAWQLLRRLDSDPLVNPGHANVTPDQIAHQLIQNGKTNCSRIKMKINRVPELETHQLSSPLNLKELREAIKRCKTGKAPGLDDLMMEQIKHLGPKAENWLLKFYNQCLAHKQIPRAWRKAKIIAILKPGKDASNARNYRPISLLCHLYKVYERMLLNRLGPVIEPKLIAQQAGFRPGKNCTGQILHLTEHIEEGYEKGCITGTVFVDLTAAYDTVQHRKMLHKVYHITRDFDFTKTVQTLLENRSFYVEFQGQKSRWRRQKNGLPQGSVLAPTLFNIFTNDQPQPPLTKSFIYADDLGLTTQAKDFETVEKQLTNALKDLSSYYKENHLKPNPAKTQVCAFHLRNREANRKLKVTWEGQELEHCFHPKYLGVTLDRTLTYRKHCMNTKHKVAARNNILRKLTGSAWGADPQVIRTSALALSFSTAEYACPVWHKSAHAKQVDIALNETCRIITGCLKPTPVDKLYKLAGIAPPDVRREVAANGERKKVEHCESHPLHGYHPPPTRLKSRKGFMRTTTPLDVPPAAARVSLWAAKPGNSNWMAPQEGLPPGANQEWATWKSLNRLRSGVGRSKDNLARWHYLEESSTLCDCGAEQTTQHMYACPQCPASCTEEELFKATDNAVAVARFWSKTI

SEQ ID NO: 81 - protein, 982 aa, synthetic construct
MDEYQRSLSRPLLTIMSINIEGLSLAKEELLAKMSEDISCDILCIQETHRDITMRRPKILGMQLAVERPHRQYGSAIFVRSGVAISATSLTEVNNIEILSVELDSCTVSSLYKPPGADFYFTPPTSCHNHEAHFVVGDFNSHSCVWGYDEDDRNGEAVLTWADNSRMSLLHDSKLPPSFNSGRWKRGYNPDLIFVKESISHQCTKRVLNPIPNTQHRPICCVAYAAVRPKSVPFRRRFNFNKANWTKFTETLEAAISDIEPSIENYDLFVEAVKRSSRLSIPRGCRTSYLPGLNEESLNQLQEYLRLFQENPYSDGTIAAGQKLSTALANAKKDRWIELLENLDMSKSSRKAWQLLRRLDSDPLVNPGHANVTPDQIAHQLIQNGKTNCSRIKMKINRVPELETHQLSSPLNLKELREAIKRCKTGKAPGLDDLMMEQIKHLGPKAENWLLKFYNQCLAHKQIPRAWRKTKIIAILKPGKDASNARNYRPISLLCHLYKVYERMLLNRLGPVIEPKLIAQQAGFRPGKNCTGQILHLTEHIEEGYEKGCITGTVFVDLTAAYDTVQHRKMLHKVYHITRDFDFTKTVQTLLENRSFYVEFQGQKSRWRRQKNGLPQGSVLAPTLFNIFTNDQPQPPLTKSFIYADDLGLTTQAKDFETVEKQLTNALKDLSSWYKENHLKPNPAKTQVCAFHLRNREANRKLKVTWEGQELEHCFHPKYLGVTLDRTLTYRKHCMNTKHKVAARNNILRKLTGSAWGADPQVIRTSALALSFSTAEYACPVWHKSAHAKQVDIALNETCRIITGCLKPTPVDKLYKLAGIAPPDVRREVAANGERKKVEHCESHPLHGYHPPPTRLKSRKGFMRTTTPLDVPPAAARVSLWAAKPGNSNWMAPQEGLPPGANQEWATWKSLNRLRSGVGRSKDNLARWHYLEESSTLCDCGAEQTTQHMYACPQCPASCTEEELFKATDNAVAVARFWSKTI

SEQ ID NO: 82 - protein, 982 aa, synthetic construct
MDEYQRSLSRPLLTIMSINIEGLSLAKEELLAKMSEDISCDILCIQETHRDITMRRPKILGMQLAVERPHRQYGSAIFVRSGVAISATSLTEVNNIEILSVELDSCTVSSLYKPPGADFYFTPPTSCHNHEAHFVVGDFNSHSCVWGYDEDDRNGEAVLTWADNSRMSLLHDSKLPPSFNSGRWKRGYNPDLIFVKESISHQCTKRVLNPIPNTQHRPICCVAYAAVRPKSVPFRRRFNFNKANWTKFTETLEAAISDIEPSIENYDLFVEAVKRSSRLSIPRGCRTSYLPGLNEESLNQLQEYLRLFQENPYSDGTIAAGQKLSTALANAKKDRWIELLENLDMSKSSRKAWQLLRRLDSDPLVNPGHANVTPDQIAHQLIQNGKTNCSRIKMKINRVPELETHQLSSPLNLKELREAIKRCKTGKAPGLDDLMMEQIKHLGPKAENWLLKFYNQCLAHKQIPRAWRKTKIIAILKPGKDASNARNYRPISLLCHLYKVYERMLLNRLGPVIEPKLIAQQAGFRPGKNCTGQILHLTEHIEEGYEKGCITGTVFVDLTAAYDTVQHRKMLHKVYHITRDFDFTKTVQTLLENRSFYVEFQGQKSRWRRQKNGLPQGSVLAPTLFNIFTNDQPQPPLTKSFIYADDLGLTTQAKDFETVEKQLTNALKDLSSYYKENHLKPNPAKTQVCAFHLRNREANRKLKVTWEGQELEHCFHPKYLGVTLDRTLTYRKHCMNTKHKVAARNNILRKLTGSAWGADPQVIRTSALALSFSTAEYACPVWHKSAHAKQVDIALNETCRIITGCLKPTPVDKLYKLAGIAPPDVRREVAANGERKKVEHCESHPLHGYHPPPTRLKSRKGFMRTTTPLDVPPAAARVSLWAAKPGNSNWMAPQEGLPPGANQEWATWKSLNRLRSGVGRSKDNLARWHYLEESSTLCDCGAEQTTQHMMACPQCPASCTEEELFKATDNAVAVARFWSKTI

SEQ ID NO: 83 - protein, 982 aa, synthetic construct
MDEYQRSLSRPLLTIMSINIEGLSLAKEELLAKMSEDISCDILCIQETHRDITMRRPKILGMQLAVERPHRQYGSAIFVRSGVAISATSLTEVNNIEILSVELDSCTVSSLYKPPGADFYFTPPTSCHNHEAHFVVGDFNSHSCVWGYDEDDRNGEAVLTWADNSRMSLLHDSKLPPSFNSGRWKRGYNPDLIFVKESISHQCTKRVLNPIPNTQHRPICCVAYAAVRPKSVPFRRRFNFNKANWTKFTETLEAAISDIEPSIENYDLFVEAVKRSSRLSIPRGCRTSYLPGLNEESLNQLQEYLRLFQENPYSDGTIAAGQKLSTALANAKKDRWIELLENLDMSKSSRKAWQLLRRLDSDPLVNPGHANVTPDQIAHQLIQNGKTNCSRIKMKINRVPELETHQLSSPLNLKELREAIKRCKTGKAPGLDDLMMEQIKHLGPKAENWLLKFYNQCLAHKQIPRAWRKTKIIAILKPGKDASNARNYRPISLLCHLYKVYERMLLNRLGPVIEPKLIAQQAGFRPGKNCTGQILHLTEHIEEGYEKGCITGTVFVDLTAAYDTVQHRKMLHKVYHITRDFDFTKTVQTLLENRSFYVEFQGQKSRWRRQKNGLPQGSVLAPTLFNIFTNDQPQPPLTKSFIYADDLGLTTQAKDFETVEKQLTNALKDLSSYYKENHLKPNPAKTQVCAFHLRNREANRKLKVTWEGQELEHCFHPKYLGVTLDRTLTYRKHCMNTKHKVAARNNILRKLTGSAWGADPQVIRTSALALSFSTAEYACPVWHKSAHAKQVDIALNETCRIITGCLKPTPVDKLYKLAGIAPPDVRREVAANGERKKVEHCESHPLHGYHPPPTRLKSRKGFMRTTTPLDVPPAAARVSLWAAKPGNSNWMAPQEGLPPGHNQEWATWKSLNRLRSGVGRSKDNLARWHYLEESSTLCDCGAEQTTQHMYACPQCPASCTEEELFKATDNAVAVARFWSKTI

SEQ ID NO: 84 - protein, 982 aa, synthetic construct
MDEYQRSLSRPLLTIMSINIEGLSLAKEELLAKMSEDISCDILCIQETHRDITMRRPKILGMQLAVERPHRQYGSAIFVRSGVAISATSLTEVNNIEILSVELDSCTVSSLYKPPGADFYFTPPTSCHNHEAHFVVGDFNSHSCVWGYDEDDRNGEAVLTWADNSRMSLLHDSKLPPSFNSGRWKRGYNPDLIFVKESISHQCTKRVLNPIPNTQHRPICCVAYAAVRPKSVPFRRRFNFNKANWTKFTETLEAAISDIEPSIENYDLFVEAVKRSSRLSIPRGCRTSYLPGLNEESLNQLQEYLRLFQENPYSDGTIAAGQKLSTALANAKKDRWIELLENLDMSKSSRKAWQLLRRLDSDPLVNPGHANVTPDQIAHQLIQNGKTNCSRIKMKINRVPELETHQLSSPLNLKELREAIKRCKTGKAPGLDDLMMEQIKHLGPKAENWLLKFYNQCLAHKQIPRAWRKTKIIAILKPGKDASNARNYRPISLLCHLYKVYERMLLNRLGPVIEPKLIAQQAGFRPGKNCTGQILHLTEHIEEGYEKGCITGTVFVDLTAAYDTVQHRKMLHKVYHITRDFDFTKTVQTLLENRSFYVEFQGQKSRWRRQKNGLPQGSVLAPTLFNIFTNDQPQPPLTKSFIYADDLGLTTQAKDFETVEKQLTNALKDLSSYYKENHLKPNPAKTQVCAFHLRNREANRKLKVTWEGQELEHCFHPKYLGVTLDRTLTYRKHCMNTKHKVAARNNILRKLTGSAWGADPQVIRTSALALSFSTAEYACPVWHKSAHAKQVDIALNETCRIITGCLKPTPVDKLYKLAGIAPPDVRREVAANIERKKVEHCESHPLHGYHPPPTRLKSRKGFMRTTTPLDVPPAAARVSLWAAKPGNSNWMAPQEGLPPGANQEWATWKSLNRLRSGVGRSKDNLARWHYLEESSTLCDCGAEQTTQHMYACPQCPASCTEEELFKATDNAVAVARFWSKTI

SEQ ID NO: 85 - protein, 982 aa, synthetic construct
MDEYQRSLSRPLLTIMSINIEGLSLAKEELLAKMSEDISCDILCIQETHRDITMRRPKILGMQLAVERPHRQYGSAIFVRSGVAISATSLTEVNNIEILSVELDSCTVSSLYKPPGADFYFTPPTSCHNHEAHFVVGDFNSHSCVWGYDEDDRNGEAVLTWADNSRMSLLHDSKLPPSFNSGRWKRGYNPDLIFVKESISHQCTKRVLNPIPNTQHRPICCVAYAAVRPKSVPFRRRFNFNKANWTKFTETLEAAISDIEPSIENYDLFVEAVKRSSRLSIPRGCRTSYLPGLNEESLNQLQEYLRLFQENPYSDGTIAAGQKLSTALANAKKDRWIELLENLDMSKSSRKAWQLLRRLDSDPLVNPGHANVTPDQIAHQLIQNGKTNCSRIKMKINRVPELETHQLSSPLNLKELREAIKRCKTGKAPGLDDLMMEQIKHLGPKAENWLLKFYNQCLAHKQIPRAWRKTKIIAILKPGKDASNARNYRPISLLCHLYKVYERMLLNRLGPVIEPKLIAQQAGFRPGKNCTGQILHLTEHIEEGYEKGCITGTVFVDLTAAYDTVQHRKMLHKVYHITRDFDFTKTVQTLLENRSFYVEFQGQKSRWRRQKNGLPQGSVLAPTLFNIFTNDQPQPPLTKSFIYADDLGLTTQAKDFETVEKQLTNALKDLSSYYKENHLKPNPAKTQVCAFHLRNREANRKLKVTWEGQELEHCFHPKYLGVTLDRTLTYRKHCMNTKHKVAARNNILRKLTGSAWGADPQVIRTSALALSFSTAEYACPVWHKSAHAKQVDIALNETCRIITGCLKPTPVDKLYKLAGIAPPDVRREVAANSERKKVEHCESHPLHGYHPPPTRLKSRKGFMRTTTPLDVPPAAARVSLWAAKPGNSNWMAPQEGLPPGANQEWATWKSLNRLRSGVGRSKDNLARWHYLEESSTLCDCGAEQTTQHMYACPQCPASCTEEELFKATDNAVAVARFWSKTI

SEQ ID NO: 86 - protein, 982 aa, synthetic construct
MDEYQRSLSRPLLTIMSINIEGLSLAKEELLAKMSEDISCDILCIQETHRDITMRRPKILGMQLAVERPHRQYGSAIFVRSGVAISATSLTEVNNIEILSVELDSCTVSSLYKPPGADFYFTPPTSCHNHEAHFVVGDFNSHSCVWGYDEDDRNGEAVLTWADNSRMSLLHDSKLPPSFNSGRWKRGYNPDLIFVKESISHQCTKRVLNPIPNTQHRPICCVAYAAVRPKSVPFRRRFNFNKANWTKFTETLEAAISDIEPSIENYDLFVEAVKRSSRLSIPRGCRTSYLPGLNEESLNQLQEYLRLFQENPYSDGTIAAGQKLSTALANAKKDRWIELLENLDMSKSSKKAWQLLRRLDSDPLVNPGHANVTPDQIAHQLIQNGKTNCSRIKMKINRVPELETHQLSSPLNLKELREAIKRCKTGKAPGLDDLMMEQIKHLGPKAENWLLKFYNQCLAHKQIPRAWRKTKIIAILKPGKDASNARNYRPISLLCHLYKVYERMLLNRLGPVIEPKLIAQQAGFRPGKNCTGQILHLTEHIEEGYEKGCITGTVFVDLTAAYDTVQHRKMLHKVYHITRDFDFTKTVQTLLENRSFYVEFQGQKSRWRRQKNGLPQGSVLAPTLFNIFTNDQPQPPLTKSFIYADDLGLTTQAKDFETVEKQLTNALKDLSSYYKENHLKPNPAKTQVCAFHLRNREANRKLKVTWEGQELEHCFHPKYLGVTLDRTLTYRKHCMNTKHKVAARNNILRKLTGSAWGADPQVIRTSALALSFSTAEYACPVWHKSAHAKQVDIALNETCRIITGCLKPTPVDKLYKLAGIAPPDVRREVAANGERKKVEHCESHPLHGYHPPPTRLKSRKGFMRTTTPLDVPPAAARVSLWAAKPGNSNWMAPQEGLPPGANQEWATWKSLNRLRSGVGRSKDNLARWHYLEESSTLCDCGAEQTTQHMYACPQCPASCTEEELFKATDNAVAVARFWSKTI

SEQ ID NO: 87 - protein, 982 aa, synthetic construct
MDEYQRSLSRPLLTIMSINIEGLSLAKEELLAKMCEDISCDILCIQETHRDITMRRPKILGMQLAVERPHRQYGSAIFVRSGVAISATSLTEVNNIEILSVELDSCTVSSLYKPPGADFYFTPPTSCHNHEAHFVVGDFNSHSCVWGYDEDDRNGEAVLTWADNSRMSLLHDSKLPPSFNSGRWKRGYNPDLIFVKESISHQCTKRVLNPIPNTQHRPICCVAYAAVRPKSVPFRRRFNFNKANWTKFTETLEAAISDIEPSIENYDLFVEAVKRSSRLSIPRGCRTSYLPGLNEESLNQLQEYLRLFQENPYSDGTIAAGQKLSTALANAKKDRWIELLENLDMSKSSRKAWQLLRRLDSDPLVNPGHANVTPDQIAHQLIQNGKTNCSRIKMKINRVPELETHQLSSPLNLKELREAIKRCKTGKAPGLDDLMMEQIKHLGPKAENWLLKFYNQCLAHKQIPRAWRKTKIIAILKPGKDASNARNYRPISLLCHLYKVYERMLLNRLGPVIEPKLIAQQAGFRPGKNCTGQILHLTEHIEEGYEKGCITGTVFVDLTAAYDTVQHRKMLHKVYHITRDFDFTKTVQTLLENRSFYVEFQGQKSRWRRQKNGLPQGSVLAPTLFNIFTNDQPQPPLTKSFIYADDLGLTTQAKDFETVEKQLTNALKDLSSYYKENHLKPNPAKTQVCAFHLRNREANRKLKVTWEGQELEHCFHPKYLGVTLDRTLTYRKHCMNTKHKVAARNNILRKLTGSAWGADPQVIRTSALALSFSTAEYACPVWHKSAHAKQVDIALNETCRIITGCLKPTPVDKLYKLAGIAPPDVRREVAANGERKKVEHCESHPLHGYHPPPTRLKSRKGFMRTTTPLDVPPAAARVSLWAAKPGNSNWMAPQEGLPPGANQEWATWKSLNRLRSGVGRSKDNLARWHYLEESSTLCDCGAEQTTQHMYACPQCPASCTEEELFKATDNAVAVARFWSKTI

SEQ ID NO: 88 - protein, 982 aa, synthetic construct
MDEYQRSLSRPLLTIMSINIEGLSLAKEELLAKMSEDISCDILCIQETHRDITMRRPKILGMQLAVERPHRQYGSAIFVRSGVAISATSLTEVNNIEILSVELDSCTVSSVYKPPGADFYFTPPTSCHNHEAHFVVGDFNSHSCVWGYDEDDRNGEAVLTWADNSRMSLLHDSKLPPSFNSGRWKRGYNPDLIFVKESISHQCTKRVLNPIPNTQHRPICCVAYAAVRPKSVPFRRRFNFNKANWTKFTETLEAAISDIEPSIENYDLFVEAVKRSSRLSIPRGCRTSYLPGLNEESLNQLQEYLRLFQENPYSDGTIAAGQKLSTALANAKKDRWIELLENLDMSKSSRKAWQLLRRLDSDPLVNPGHANVTPDQIAHQLIQNGKTNCSRIKMKINRVPELETHQLSSPLNLKELREAIKRCKTGKAPGLDDLMMEQIKHLGPKAENWLLKFYNQCLAHKQIPRAWRKTKIIAILKPGKDASNARNYRPISLLCHLYKVYERMLLNRLGPVIEPKLIAQQAGFRPGKNCTGQILHLTEHIEEGYEKGCITGTVFVDLTAAYDTVQHRKMLHKVYHITRDFDFTKTVQTLLENRSFYVEFQGQKSRWRRQKNGLPQGSVLAPTLFNIFTNDQPQPPLTKSFIYADDLGLTTQAKDFETVEKQLTNALKDLSSYYKENHLKPNPAKTQVCAFHLRNREANRKLKVTWEGQELEHCFHPKYLGVTLDRTLTYRKHCMNTKHKVAARNNILRKLTGSAWGADPQVIRTSALALSFSTAEYACPVWHKSAHAKQVDIALNETCRIITGCLKPTPVDKLYKLAGIAPPDVRREVAANGERKKVEHCESHPLHGYHPPPTRLKSRKGFMRTTTPLDVPPAAARVSLWAAKPGNSNWMAPQEGLPPGANQEWATWKSLNRLRSGVGRSKDNLARWHYLEESSTLCDCGAEQTTQHMYACPQCPASCTEEELFKATDNAVAVARFWSKTI

SEQ ID NO: 89 - protein, 982 aa, synthetic construct
MDEYQRSLSRPLLTIISINIEGLSLAKEELLAKMSEDISCDILCIQETHRDITMRRPKILGMQLAVERPHRQYGSAIFVRSGVAISATSLTEVNNIEILSVELDSCTVSSLYKPPGADFYFTPPTSCHNHEAHFVVGDFNSHSCVWGYDEDDRNGEAVLTWADNSRMSLLHDSKLPPSFNSGRWKRGYNPDLIFVKESISHQCTKRVLNPIPNTQHRPICCVAYAAVRPKSVPFRRRFNFNKANWTKFTETLEAAISDIEPSIENYDLFVEAVKRSSRLSIPRGCRTSYLPGLNEESLNQLQEYLRLFQENPYSDGTIAAGQKLSTALANAKKDRWIELLENLDMSKSSRKAWQLLRRLDSDPLVNPGHANVTPDQIAHQLIQNGKTNCSRIKMKINRVPELETHQLSSPLNLKELREAIKRCKTGKAPGLDDLMMEQIKHLGPKAENWLLKFYNQCLAHKQIPRAWRKTKIIAILKPGKDASNARNYRPISLLCHLYKVYERMLLNRLGPVIEPKLIAQQAGFRPGKNCTGQILHLTEHIEEGYEKGCITGTVFVDLTAAYDTVQHRKMLHKVYHITRDFDFTKTVQTLLENRSFYVEFQGQKSRWRRQKNGLPQGSVLAPTLFNIFTNDQPQPPLTKSFIYADDLGLTTQAKDFETVEKQLTNALKDLSSYYKENHLKPNPAKTQVCAFHLRNREANRKLKVTWEGQELEHCFHPKYLGVTLDRTLTYRKHCMNTKHKVAARNNILRKLTGSAWGADPQVIRTSALALSFSTAEYACPVWHKSAHAKQVDIALNETCRIITGCLKPTPVDKLYKLAGIAPPDVRREVAANGERKKVEHCESHPLHGYHPPPTRLKSRKGFMRTTTPLDVPPAAARVSLWAAKPGNSNWMAPQEGLPPGANQEWATWKSLNRLRSGVGRSKDNLARWHYLEESSTLCDCGAEQTTQHMYACPQCPASCTEEELFKATDNAVAVARFWSKTI

SEQ ID NO: 90 - protein, 982 aa, synthetic construct
MDEYQRSLSRPLLTIMSINIEGLSLAKEELLAKMSEDISCDILCIQETHRDITMRRPKILGMQLAVERPHRQYGSAIFVRSGVAISSTSLTEVNNIEILSVELDSCTVSSLYKPPGADFYFTPPTSCHNHEAHFVVGDFNSHSCVWGYDEDDRNGEAVLTWADNSRMSLLHDSKLPPSFNSGRWKRGYNPDLIFVKESISHQCTKRVLNPIPNTQHRPICCVAYAAVRPKSVPFRRRFNFNKANWTKFTETLEAAISDIEPSIENYDLFVEAVKRSSRLSIPRGCRTSYLPGLNEESLNQLQEYLRLFQENPYSDGTIAAGQKLSTALANAKKDRWIELLENLDMSKSSRKAWQLLRRLDSDPLVNPGHANVTPDQIAHQLIQNGKTNCSRIKMKINRVPELETHQLSSPLNLKELREAIKRCKTGKAPGLDDLMMEQIKHLGPKAENWLLKFYNQCLAHKQIPRAWRKTKIIAILKPGKDASNARNYRPISLLCHLYKVYERMLLNRLGPVIEPKLIAQQAGFRPGKNCTGQILHLTEHIEEGYEKGCITGTVFVDLTAAYDTVQHRKMLHKVYHITRDFDFTKTVQTLLENRSFYVEFQGQKSRWRRQKNGLPQGSVLAPTLFNIFTNDQPQPPLTKSFIYADDLGLTTQAKDFETVEKQLTNALKDLSSYYKENHLKPNPAKTQVCAFHLRNREANRKLKVTWEGQELEHCFHPKYLGVTLDRTLTYRKHCMNTKHKVAARNNILRKLTGSAWGADPQVIRTSALALSFSTAEYACPVWHKSAHAKQVDIALNETCRIITGCLKPTPVDKLYKLAGIAPPDVRREVAANGERKKVEHCESHPLHGYHPPPTRLKSRKGFMRTTTPLDVPPAAARVSLWAAKPGNSNWMAPQEGLPPGANQEWATWKSLNRLRSGVGRSKDNLARWHYLEESSTLCDCGAEQTTQHMYACPQCPASCTEEELFKATDNAVAVARFWSKTI

SEQ ID NO: 91 - protein, 982 aa, synthetic construct
MDEYQRSLSRPLLTIMSINIEGLSLAKEELLAKMSEDISCDILCIQETHRDITMRRPKILGMQLAVERPHRQYGSAIFVRSGVAISATSLTEVNNIEILSVELDSCTVSSLYKPPGADFYFTPPTSCHNHEAHFVVGDFNSHSCVWGYDEDDRNGEAVLTWADNSRMSLLHDSKLPPSFNSGRWKRGYNPDLIFVKESISHQCTKRVLNPIPNTQHRPICCVAYAAVRPKSVPFRRRFNFNKANWTKFTETLEAAISDIEPSIENYDLFVEAVKRSSRLSIPRGCRTSYLPGLNEESLNQLQEYLRLFQEDPYSDGTIAAGQKLSTALANAKKDRWIELLENLDMSKSSRKAWQLLRRLDSDPLVNPGHANVTPDQIAHQLIQNGKTNCSRIKMKINRVPELETHQLSSPLNLKELREAIKRCKTGKAPGLDDLMMEQIKHLGPKAENWLLKFYNQCLAHKQIPRAWRKTKIIAILKPGKDASNARNYRPISLLCHLYKVYERMLLNRLGPVIEPKLIAQQAGFRPGKNCTGQILHLTEHIEEGYEKGCITGTVFVDLTAAYDTVQHRKMLHKVYHITRDFDFTKTVQTLLENRSFYVEFQGQKSRWRRQKNGLPQGSVLAPTLFNIFTNDQPQPPLTKSFIYADDLGLTTQAKDFETVEKQLTNALKDLSSYYKENHLKPNPAKTQVCAFHLRNREANRKLKVTWEGQELEHCFHPKYLGVTLDRTLTYRKHCMNTKHKVAARNNILRKLTGSAWGADPQVIRTSALALSFSTAEYACPVWHKSAHAKQVDIALNETCRIITGCLKPTPVDKLYKLAGIAPPDVRREVAANGERKKVEHCESHPLHGYHPPPTRLKSRKGFMRTTTPLDVPPAAARVSLWAAKPGNSNWMAPQEGLPPGANQEWATWKSLNRLRSGVGRSKDNLARWHYLEESSTLCDCGAEQTTQHMYACPQCPASCTEEELFKATDNAVAVARFWSKTI

SEQ ID NO: 92 - protein, 982 aa, synthetic construct
MDEYQRSLSRPLLTIMSINIEGLSLAKEELLAKMSEDISCDILCIQETHRDSTMRRPKILGMQLAVERPHRQYGSAIFVRSGVAISATSLTEVNNIEILSVELDSCTVSSLYKPPGADFYFTPPTSCHNHEAHFVVGDFNSHSCVWGYDEDDRNGEAVLTWADNSRMSLLHDSKLPPSFNSGRWKRGYNPDLIFVKESISHQCTKRVLNPIPNTQHRPICCVAYAAVRPKSVPFRRRFNFNKANWTKFTETLEAAISDIEPSIENYDLFVEAVKRSSRLSIPRGCRTSYLPGLNEESLNQLQEYLRLFQENPYSDGTIAAGQKLSTALANAKKDRWIELLENLDMSKSSRKAWQLLRRLDSDPLVNPGHANVTPDQIAHQLIQNGKTNCSRIKMKINRVPELETHQLSSPLNLKELREAIKRCKTGKAPGLDDLMMEQIKHLGPKAENWLLKFYNQCLAHKQIPRAWRKTKIIAILKPGKDASNARNYRPISLLCHLYKVYERMLLNRLGPVIEPKLIAQQAGFRPGKNCTGQILHLTEHIEEGYEKGCITGTVFVDLTAAYDTVQHRKMLHKVYHITRDFDFTKTVQTLLENRSFYVEFQGQKSRWRRQKNGLPQGSVLAPTLFNIFTNDQPQPPLTKSFIYADDLGLTTQAKDFETVEKQLTNALKDLSSYYKENHLKPNPAKTQVCAFHLRNREANRKLKVTWEGQELEHCFHPKYLGVTLDRTLTYRKHCMNTKHKVAARNNILRKLTGSAWGADPQVIRTSALALSFSTAEYACPVWHKSAHAKQVDIALNETCRIITGCLKPTPVDKLYKLAGIAPPDVRREVAANGERKKVEHCESHPLHGYHPPPTRLKSRKGFMRTTTPLDVPPAAARVSLWAAKPGNSNWMAPQEGLPPGANQEWATWKSLNRLRSGVGRSKDNLARWHYLEESSTLCDCGAEQTTQHMYACPQCPASCTEEELFKATDNAVAVARFWSKTI

SEQ ID NO: 93 - protein, 982 aa, synthetic construct
MDEYQRSLSRPLLTIMSINIEGLSLAKEELLAKMSEDISCDILCIQETHRDITMRRPKILGMQLAVERPHRQYGSAIFVRSGVAISATSLTEVNNIEILSVELDSCTVSSLYKPPGADFYFTPPTSCHNHEAHFVVGDFNSHSCVWGYDEDDRNGEAVLTWADNSRMSLLHDSKLPPSFNSGRWKRGYNPDLIFVKESISHQCTKRVLNPIPNTQHRPICCVAYAAVRPKSVPFRRRFNFNKANWTKFTETLEAAISDIEPSIENYDLFVEAVKRSSRLSIPRGCRTSYLPGLNEESLNQLQEYLRLFQENPFSDGTIAAGQKLSTALANAKKDRWIELLENLDMSKSSRKAWQLLRRLDSDPLVNPGHANVTPDQIAHQLIQNGKTNCSRIKMKINRVPELETHQLSSPLNLKELREAIKRCKTGKAPGLDDLMMEQIKHLGPKAENWLLKFYNQCLAHKQIPRAWRKTKIIAILKPGKDASNARNYRPISLLCHLYKVYERMLLNRLGPVIEPKLIAQQAGFRPGKNCTGQILHLTEHIEEGYEKGCITGTVFVDLTAAYDTVQHRKMLHKVYHITRDFDFTKTVQTLLENRSFYVEFQGQKSRWRRQKNGLPQGSVLAPTLFNIFTNDQPQPPLTKSFIYADDLGLTTQAKDFETVEKQLTNALKDLSSYYKENHLKPNPAKTQVCAFHLRNREANRKLKVTWEGQELEHCFHPKYLGVTLDRTLTYRKHCMNTKHKVAARNNILRKLTGSAWGADPQVIRTSALALSFSTAEYACPVWHKSAHAKQVDIALNETCRIITGCLKPTPVDKLYKLAGIAPPDVRREVAANGERKKVEHCESHPLHGYHPPPTRLKSRKGFMRTTTPLDVPPAAARVSLWAAKPGNSNWMAPQEGLPPGANQEWATWKSLNRLRSGVGRSKDNLARWHYLEESSTLCDCGAEQTTQHMYACPQCPASCTEEELFKATDNAVAVARFWSKTI

SEQ ID NO: 94 - protein, 982 aa, synthetic construct
MDEYQRSLSRPLLTIMSINIEGLSLAKEELLAKMSEDISCDILCIQETHRDPTMRRPKILGMQLAVERPHRQYGSAIFVRSGVAISATSLTEVNNIEILSVELDSCTVSSLYKPPGADFYFTPPTSCHNHEAHFVVGDFNSHSCVWGYDEDDRNGEAVLTWADNSRMSLLHDSKLPPSFNSGRWKRGYNPDLIFVKESISHQCTKRVLNPIPNTQHRPICCVAYAAVRPKSVPFRRRFNFNKANWTKFTETLEAAISDIEPSIENYDLFVEAVKRSSRLSIPRGCRTSYLPGLNEESLNQLQEYLRLFQENPYSDGTIAAGQKLSTALANAKKDRWIELLENLDMSKSSRKAWQLLRRLDSDPLVNPGHANVTPDQIAHQLIQNGKTNCSRIKMKINRVPELETHQLSSPLNLKELREAIKRCKTGKAPGLDDLMMEQIKHLGPKAENWLLKFYNQCLAHKQIPRAWRKTKIIAILKPGKDASNARNYRPISLLCHLYKVYERMLLNRLGPVIEPKLIAQQAGFRPGKNCTGQILHLTEHIEEGYEKGCITGTVFVDLTAAYDTVQHRKMLHKVYHITRDFDFTKTVQTLLENRSFYVEFQGQKSRWRRQKNGLPQGSVLAPTLFNIFTNDQPQPPLTKSFIYADDLGLTTQAKDFETVEKQLTNALKDLSSYYKENHLKPNPAKTQVCAFHLRNREANRKLKVTWEGQELEHCFHPKYLGVTLDRTLTYRKHCMNTKHKVAARNNILRKLTGSAWGADPQVIRTSALALSFSTAEYACPVWHKSAHAKQVDIALNETCRIITGCLKPTPVDKLYKLAGIAPPDVRREVAANGERKKVEHCESHPLHGYHPPPTRLKSRKGFMRTTTPLDVPPAAARVSLWAAKPGNSNWMAPQEGLPPGANQEWATWKSLNRLRSGVGRSKDNLARWHYLEESSTLCDCGAEQTTQHMYACPQCPASCTEEELFKATDNAVAVARFWSKTI

SEQ ID NO: 95 - protein, 982 aa, synthetic construct
MDEYQRSLSRPLLTIMSINIEGLSLAKEELLAKMSEDISCDILCIQETHRDITMRRPKILGMQLAVERPHRQYGSAIFVRSGVAISATSLTEVNNIEILSVELDSCTVTSLYKPPGADFYFTPPTSCHNHEAHFVVGDFNSHSCVWGYDEDDRNGEAVLTWADNSRMSLLHDSKLPPSFNSGRWKRGYNPDLIFVKESISHQCTKRVLNPIPNTQHRPICCVAYAAVRPKSVPFRRRFNFNKANWTKFTETLEAAISDIEPSIENYDLFVEAVKRSSRLSIPRGCRTSYLPGLNEESLNQLQEYLRLFQENPYSDGTIAAGQKLSTALANAKKDRWIELLENLDMSKSSRKAWQLLRRLDSDPLVNPGHANVTPDQIAHQLIQNGKTNCSRIKMKINRVPELETHQLSSPLNLKELREAIKRCKTGKAPGLDDLMMEQIKHLGPKAENWLLKFYNQCLAHKQIPRAWRKTKIIAILKPGKDASNARNYRPISLLCHLYKVYERMLLNRLGPVIEPKLIAQQAGFRPGKNCTGQILHLTEHIEEGYEKGCITGTVFVDLTAAYDTVQHRKMLHKVYHITRDFDFTKTVQTLLENRSFYVEFQGQKSRWRRQKNGLPQGSVLAPTLFNIFTNDQPQPPLTKSFIYADDLGLTTQAKDFETVEKQLTNALKDLSSYYKENHLKPNPAKTQVCAFHLRNREANRKLKVTWEGQELEHCFHPKYLGVTLDRTLTYRKHCMNTKHKVAARNNILRKLTGSAWGADPQVIRTSALALSFSTAEYACPVWHKSAHAKQVDIALNETCRIITGCLKPTPVDKLYKLAGIAPPDVRREVAANGERKKVEHCESHPLHGYHPPPTRLKSRKGFMRTTTPLDVPPAAARVSLWAAKPGNSNWMAPQEGLPPGANQEWATWKSLNRLRSGVGRSKDNLARWHYLEESSTLCDCGAEQTTQHMYACPQCPASCTEEELFKATDNAVAVARFWSKTI

SEQ ID NO: 96 - protein, 982 aa, synthetic construct
MDEYQRSLSRPLLTIMSINIEGLSLAKEELLAKMSEDISCDILCIQETHRDITMRRPKILGMQLAVERPHRQYGSAIFVRSGVAISATSLTEVNNIEILSVELDSCTVSSLYKPPGADFYFTPPTSCHNHEAHFVVGDFNSHSCVWGYDEDDRNGEAVLTWADNSRMSLLHDSKLPPSFNSGRWKRGYNPDLIFVKESISHQCTKRVLNPIPNTDHRPICCVAYAAVRPKSVPFRRRFNFNKANWTKFTETLEAAISDIEPSIENYDLFVEAVKRSSRLSIPRGCRTSYLPGLNEESLNQLQEYLRLFQENPYSDGTIAAGQKLSTALANAKKDRWIELLENLDMSKSSRKAWQLLRRLDSDPLVNPGHANVTPDQIAHQLIQNGKTNCSRIKMKINRVPELETHQLSSPLNLKELREAIKRCKTGKAPGLDDLMMEQIKHLGPKAENWLLKFYNQCLAHKQIPRAWRKTKIIAILKPGKDASNARNYRPISLLCHLYKVYERMLLNRLGPVIEPKLIAQQAGFRPGKNCTGQILHLTEHIEEGYEKGCITGTVFVDLTAAYDTVQHRKMLHKVYHITRDFDFTKTVQTLLENRSFYVEFQGQKSRWRRQKNGLPQGSVLAPTLFNIFTNDQPQPPLTKSFIYADDLGLTTQAKDFETVEKQLTNALKDLSSYYKENHLKPNPAKTQVCAFHLRNREANRKLKVTWEGQELEHCFHPKYLGVTLDRTLTYRKHCMNTKHKVAARNNILRKLTGSAWGADPQVIRTSALALSFSTAEYACPVWHKSAHAKQVDIALNETCRIITGCLKPTPVDKLYKLAGIAPPDVRREVAANGERKKVEHCESHPLHGYHPPPTRLKSRKGFMRTTTPLDVPPAAARVSLWAAKPGNSNWMAPQEGLPPGANQEWATWKSLNRLRSGVGRSKDNLARWHYLEESSTLCDCGAEQTTQHMYACPQCPASCTEEELFKATDNAVAVARFWSKTI

SEQ ID NO: 97 - protein, 982 aa, synthetic construct
MDEYQRSLSRPLLTIMSINIEGLSLAKEELLAKMSEDISCDILCIQETHRDITMRRPKILGMQLAVERPHRQYGSAIFVRSGVAISATSLTEVNNIEILSVELDSCTVSSLYKPPGADFYFTPPTSCHNHEAHFVVGDFNSHSCVWGYDEDDRNGEAVLTWADNSRMSLLHDSKLPPSFNSGRWKRGYNPDLIFVKESISHQCTKRVLNPIPNTQHRPICCVAYAAVRPKSVPFRRRFNFNKANWTKFTETLEAAISDIEPSIENYDLFVEAVKRSSRLSIPRGCRTSYLPGLNEESLNQLQEYLRLFQENPYSDGTIAAGQKLSTALANAKKDRWIELLENLDMSKSSRKAWQLLRRLDSDPLVNPGHANVTPDQIAHQLIQNGKTNCSRIKMKINRVPELETHQLSSPLNLKELREAIKRCKTGKAPGLDDLMMEQIKHLGPKAENWLLKFYNQCLAHKQIPRAWKKTKIIAILKPGKDASNARNYRPISLLCHLYKVYERMLLNRLGPVIEPKLIAQQAGFRPGKNCTGQILHLTEHIEEGYEKGCITGTVFVDLTAAYDTVQHRKMLHKVYHITRDFDFTKTVQTLLENRSFYVEFQGQKSRWRRQKNGLPQGSVLAPTLFNIFTNDQPQPPLTKSFIYADDLGLTTQAKDFETVEKQLTNALKDLSSYYKENHLKPNPAKTQVCAFHLRNREANRKLKVTWEGQELEHCFHPKYLGVTLDRTLTYRKHCMNTKHKVAARNNILRKLTGSAWGADPQVIRTSALALSFSTAEYACPVWHKSAHAKQVDIALNETCRIITGCLKPTPVDKLYKLAGIAPPDVRREVAANGERKKVEHCESHPLHGYHPPPTRLKSRKGFMRTTTPLDVPPAAARVSLWAAKPGNSNWMAPQEGLPPGANQEWATWKSLNRLRSGVGRSKDNLARWHYLEESSTLCDCGAEQTTQHMYACPQCPASCTEEELFKATDNAVAVARFWSKTI

SEQ ID NO: 98 - protein, 982 aa, synthetic construct
MDEYQRSLSRPLLTIMSINIEGLSLAKEELLAKMSEDISCDILCIQETHRDITMRRPKILGMQLAVERPHRQYGSAIFVRSGVAISATSLTEVNNIEILSVELDSCTVSSLYKPPGADFYFTPPTSCHNHEAHFVVGDFNSHSCVWGYDEDDRNGEAVLTWADNSRMSLLHDSKLPPSFNSGRWKRGYNPDLIFVKESISHQCTKRVLNPIPNTQHRPICCVAYAAVRPKSVPFRRRFNFNKANWTKFTETLEAAISDIEPSIENYDLFVEAVKRSSRLSIPRGCRTSYLPGLNEESLNQLQEYLRLFQENPYSDGTIAAGQKLSTALANAKKDRWIELLENLDMSKSSRKAWQLLRRLDSDPLVNPGHANVTPDQIAHQLIQNGKTNCSRIKMKINRVPELETHQLSSPLNLKELREAIKRCKTGKAPGLDDLMMEQIKHLGPKAENWLLKFYNQCLAHKQIPRAWRKTKIIAILKPGKDASNARNYRPISLLSHLYKVYERMLLNRLGPVIEPKLIAQQAGFRPGKNCTGQILHLTEHIEEGYEKGCITGTVFVDLTAAYDTVQHRKMLHKVYHITRDFDFTKTVQTLLENRSFYVEFQGQKSRWRRQKNGLPQGSVLAPTLFNIFTNDQPQPPLTKSFIYADDLGLTTQAKDFETVEKQLTNALKDLSSYYKENHLKPNPAKTQVCAFHLRNREANRKLKVTWEGQELEHCFHPKYLGVTLDRTLTYRKHCMNTKHKVAARNNILRKLTGSAWGADPQVIRTSALALSFSTAEYACPVWHKSAHAKQVDIALNETCRIITGCLKPTPVDKLYKLAGIAPPDVRREVAANGERKKVEHCESHPLHGYHPPPTRLKSRKGFMRTTTPLDVPPAAARVSLWAAKPGNSNWMAPQEGLPPGANQEWATWKSLNRLRSGVGRSKDNLARWHYLEESSTLCDCGAEQTTQHMYACPQCPASCTEEELFKATDNAVAVARFWSKTI

SEQ ID NO: 99 - protein, 982 aa, synthetic construct
MDEYQRSLSRPLLTIMSINIEGLSLAKEELLAKMSEDISCDILCIQETHRDITMRRPKILGMQLAVERPHRQYGSAIFVRSGVAISATSLTEVNNIEILSVELDSCTVSSLYKPPGADFYFTPPTSCHNHEAHFVVGDFNSHSCVWGYDEDDRNGEAVLTWADNSRMSLLHDSKLPPSFNSGRWKRGYNPDLIFVKESISHQCTKRVLNPIPNTQHRPICCVAYAAVRPKSVPFRRRFNFNKANWTKFTETLEAAISDIEPSIENYDLFVEAVKRSSRLSIPRGCRTSYLPGLNEESLNQLQEYLRLFQENPYSDGTIAAGQKLSTALANAKKDRWIELLENLDMSKSSRKAWQLLRRLDSDPLVNPGHANVTPDQIAHQLIQNGKTNCSRIKMKINRVPELETHQLSSPLNLKELREAIKRCKTGKAPGLDDLMMEQIKHLGPKAENWLLKFYNQCLAHKQIPRAWRKTKIIAILKPGKDASNARNYRPISLLCHLYKVYERMLLNRLGPVIEPKLIAQQAGFRPGKSCTGQILHLTEHIEEGYEKGCITGTVFVDLTAAYDTVQHRKMLHKVYHITRDFDFTKTVQTLLENRSFYVEFQGQKSRWRRQKNGLPQGSVLAPTLFNIFTNDQPQPPLTKSFIYADDLGLTTQAKDFETVEKQLTNALKDLSSYYKENHLKPNPAKTQVCAFHLRNREANRKLKVTWEGQELEHCFHPKYLGVTLDRTLTYRKHCMNTKHKVAARNNILRKLTGSAWGADPQVIRTSALALSFSTAEYACPVWHKSAHAKQVDIALNETCRIITGCLKPTPVDKLYKLAGIAPPDVRREVAANGERKKVEHCESHPLHGYHPPPTRLKSRKGFMRTTTPLDVPPAAARVSLWAAKPGNSNWMAPQEGLPPGANQEWATWKSLNRLRSGVGRSKDNLARWHYLEESSTLCDCGAEQTTQHMYACPQCPASCTEEELFKATDNAVAVARFWSKTI

SEQ ID NO: 100 - protein, 982 aa, synthetic construct
MDEYQRSLSRPLLTIMSINIEGLSLAKEELLAKMSEDISCDILCIQETHRDITMRRPKILGMQLAVERPHRQYGSAIFVRSGVAISATSLTEVNNIEILSVELDSCTVSSLYKPPGADFYFTPPTSCHNHEAHFVVGDFNSHSCVWGYDEDDRNGEAVLTWADNSRMSLLHDSKLPPSFNSGRWKRGYNPDLIFVKESISHQCTKRVLNPIPNTQHRPICCVAYAAVRPKSVPFRRRFNFNKANWTKFTETLEAAISDIEPSIENYDLFVEAVKRSSRLSIPRGCRTSYLPGLNEESLNQLQEYLRLFQENPYSDGTIAAGQKLSTALANAKKDRWIELLENLDMSKSSRKAWQLLRRLDSDPLVNPGHANVTPDQIAHQLIQNGKTNCSRIKMKINRVPELETHQLSSPLNLKELREAIKRCKTGKAPGLDDLMMEQIKHLGPKAENWLLKFYNQCLAHKQIPRAWRKTKIIAIRKPGKDASNARNYRPISLLCHLYKVYERMLLNRLGPVIEPKLIAQQAGFRPGKNCTGQILHLTEHIEEGYEKGCITGTVFVDLTAAYDTVQHRKMLHKVYHITRDFDFTKTVQTLLENRSFYVEFQGQKSRWRRQKNGLPQGSVLAPTLFNIFTNDQPQPPLTKSFIYADDLGLTTQAKDFETVEKQLTNALKDLSSYYKENHLKPNPAKTQVCAFHLRNREANRKLKVTWEGQELEHCFHPKYLGVTLDRTLTYRKHCMNTKHKVAARNNILRKLTGSAWGADPQVIRTSALALSFSTAEYACPVWHKSAHAKQVDIALNETCRIITGCLKPTPVDKLYKLAGIAPPDVRREVAANGERKKVEHCESHPLHGYHPPPTRLKSRKGFMRTTTPLDVPPAAARVSLWAAKPGNSNWMAPQEGLPPGANQEWATWKSLNRLRSGVGRSKDNLARWHYLEESSTLCDCGAEQTTQHMYACPQCPASCTEEELFKATDNAVAVARFWSKTI

SEQ ID NO: 101 - protein, 982 aa, synthetic construct
MDEYQRSLSRPLLTIMSINIEGLSLAKEELLAKMSEDISCDILCIQETHRDITMRRPKILGMQLAVERPHRQYGSAIFVRSGVAISATSLTEVNNIEILSVELDSCTVSSLYKPPGADFYFTPPTSCHNHEAHFVVGDFNSHSCVWGYDEDDRNGEAVLTWADNSRMSLLHDSKLPPSFNSGRWKRGYNPDLIFVKESISHQCTKRVLNPIPNTQHRPICCVAYAAVRPKSVPFRRRFNFNKANWTKFTETLEAAISDIEPSIENYDLFVEAVKRSSRLSIPRGCRTSYLPGLNEESLNQLQEYLRLFQENPYSDGTIAAGQKLSTALANAKKDRWIELLENLDMSKSSRKAWQLLRRLDSDPLVNPGHANVTPDQIAHQLIQNGKTNCSRIKMKINRVPELETHQLSSPLNLKELREAIKRCKTGKAPGLDDLMMEQIKHLGPKAENWLLKFYNQCLAHKQIPRAWRKTKIRAILKPGKDASNARNYRPISLLCHLYKVYERMLLNRLGPVIEPKLIAQQAGFRPGKNCTGQILHLTEHIEEGYEKGCITGTVFVDLTAAYDTVQHRKMLHKVYHITRDFDFTKTVQTLLENRSFYVEFQGQKSRWRRQKNGLPQGSVLAPTLFNIFTNDQPQPPLTKSFIYADDLGLTTQAKDFETVEKQLTNALKDLSSYYKENHLKPNPAKTQVCAFHLRNREANRKLKVTWEGQELEHCFHPKYLGVTLDRTLTYRKHCMNTKHKVAARNNILRKLTGSAWGADPQVIRTSALALSFSTAEYACPVWHKSAHAKQVDIALNETCRIITGCLKPTPVDKLYKLAGIAPPDVRREVAANGERKKVEHCESHPLHGYHPPPTRLKSRKGFMRTTTPLDVPPAAARVSLWAAKPGNSNWMAPQEGLPPGANQEWATWKSLNRLRSGVGRSKDNLARWHYLEESSTLCDCGAEQTTQHMYACPQCPASCTEEELFKATDNAVAVARFWSKTI

SEQ ID NO: 102 - protein, 982 aa, synthetic construct
MDEYQRSLSRPLLTIMSINIEGLSLAKEELLAKMSEDISCDILCIQETHRDITMRRPKILGMQLAVERPHRQYGSAIFVRSGVAISATSLTEVNNIEILSVELDSCTVSSLYKPPGADFYFTPPTSCHNHEAHFVVGDFNSHSCVWGYDEDDRNGEAVLTWADNSRMSLLHDSKLPPSFNSGRWKRGYNPDLIFVKESISHQCTKRVLNPIPNTQHRPICCVAYAAVRPKSVPFRRRFNFNKANWTKFTETLEAAISDIEPSIENYDLFVEAVKRSSRLSIPRGCRTSYLPGLNEESLNQLQEYLRLFQENPYSDGTIAAGQKLSTALANAKKDRWIELLENLDMSKSSRKAWQLLRRLDSDPLVNPGHANVTPDQIAHQLIQNGKTNCSRIKMKINRVPELETHQLSSPLNLKELREAIKRCKTGKAPGLDDLMMEQIKHLGPKAENWLLKFYNQCLAHKQIPRAWRKTKIIAILKPGKDASNARNYRPISRLCHLYKVYERMLLNRLGPVIEPKLIAQQAGFRPGKNCTGQILHLTEHIEEGYEKGCITGTVFVDLTAAYDTVQHRKMLHKVYHITRDFDFTKTVQTLLENRSFYVEFQGQKSRWRRQKNGLPQGSVLAPTLFNIFTNDQPQPPLTKSFIYADDLGLTTQAKDFETVEKQLTNALKDLSSYYKENHLKPNPAKTQVCAFHLRNREANRKLKVTWEGQELEHCFHPKYLGVTLDRTLTYRKHCMNTKHKVAARNNILRKLTGSAWGADPQVIRTSALALSFSTAEYACPVWHKSAHAKQVDIALNETCRIITGCLKPTPVDKLYKLAGIAPPDVRREVAANGERKKVEHCESHPLHGYHPPPTRLKSRKGFMRTTTPLDVPPAAARVSLWAAKPGNSNWMAPQEGLPPGANQEWATWKSLNRLRSGVGRSKDNLARWHYLEESSTLCDCGAEQTTQHMYACPQCPASCTEEELFKATDNAVAVARFWSKTI

SEQ ID NO: 103 - protein, 982 aa, synthetic construct
MDEYQRSLSRPLLTIMSINIEGLSLAKEELLAKMSEDISCDILCIQETHRDITMRRPKILGMQLAVERPHRQYGSAIFVRSGVAISATSLTEVNNIEILSVELDSCTVSSLYKPPGADFYFTPPTSCHNHEAHFVVGDFNSHSCVWGYDEDDRNGEAVLTWADNSRMSLLHDSKLPPSFNSGRWKRGYNPDLIFVKESISHQCTKRVLNPIPNTQHRPICCVAYAAVRPKSVPFRRRFNFNKANWTKFTETLEAAISDIEPSIENYDLFVEAVKRSSRLSIPRGCRTSYLPGLNEESLNQLQEYLRLFQENPYSDGTIAAGQKLSTALANAKKDRWIELLENLDMSKSSRKARQLLRRLDSDPLVNPGHANVTPDQIAHQLIQNGKTNCSRIKMKINRVPELETHQLSSPLNLKELREAIKRCKTGKAPGLDDLMMEQIKHLGPKAENWLLKFYNQCLAHKQIPRAWRKTKIIAILKPGKDASNARNYRPISLLCHLYKVYERMLLNRLGPVIEPKLIAQQAGFRPGKNCTGQILHLTEHIEEGYEKGCITGTVFVDLTAAYDTVQHRKMLHKVYHITRDFDFTKTVQTLLENRSFYVEFQGQKSRWRRQKNGLPQGSVLAPTLFNIFTNDQPQPPLTKSFIYADDLGLTTQAKDFETVEKQLTNALKDLSSYYKENHLKPNPAKTQVCAFHLRNREANRKLKVTWEGQELEHCFHPKYLGVTLDRTLTYRKHCMNTKHKVAARNNILRKLTGSAWGADPQVIRTSALALSFSTAEYACPVWHKSAHAKQVDIALNETCRIITGCLKPTPVDKLYKLAGIAPPDVRREVAANGERKKVEHCESHPLHGYHPPPTRLKSRKGFMRTTTPLDVPPAAARVSLWAAKPGNSNWMAPQEGLPPGANQEWATWKSLNRLRSGVGRSKDNLARWHYLEESSTLCDCGAEQTTQHMYACPQCPASCTEEELFKATDNAVAVARFWSKTI

SEQ ID NO: 104 - protein, 982 aa, synthetic construct
MDEYQRSLSRPLLTIMSINIEGLSLAKEELLAKMSEDISCDILCIQETHRDITMRRPKILGMQLAVERPHRQYGSAIFVRSGVAISATSLTEVNNIEILSVELDSCTVSSLYKPPGADFYFTPPTSCHNHEAHFVVGDFNSHSCVWGYDEDDRNGEAVLTWADNSRMSLLHDSKLPPSFNSGRWKRGYNPDLIFVKESISHQCTKRVLNPIPNTQHRPICCVAYAAVRPKSVPFRRRFNFNKANWTKFTETLEAAISDIEPSIENYDLFVEAVKRSSRLSIPRGCRTSYLPGLNEESLNQLQEYLRLFQENPYSDGTIAAGQKLSTALANAKKDRWIELLENLDKSKSSRKAWQLLRRLDSDPLVNPGHANVTPDQIAHQLIQNGKTNCSRIKMKINRVPELETHQLSSPLNLKELREAIKRCKTGKAPGLDDLMMEQIKHLGPKAENWLLKFYNQCLAHKQIPRAWRKTKIIAILKPGKDASNARNYRPISLLCHLYKVYERMLLNRLGPVIEPKLIAQQAGFRPGKNCTGQILHLTEHIEEGYEKGCITGTVFVDLTAAYDTVQHRKMLHKVYHITRDFDFTKTVQTLLENRSFYVEFQGQKSRWRRQKNGLPQGSVLAPTLFNIFTNDQPQPPLTKSFIYADDLGLTTQAKDFETVEKQLTNALKDLSSYYKENHLKPNPAKTQVCAFHLRNREANRKLKVTWEGQELEHCFHPKYLGVTLDRTLTYRKHCMNTKHKVAARNNILRKLTGSAWGADPQVIRTSALALSFSTAEYACPVWHKSAHAKQVDIALNETCRIITGCLKPTPVDKLYKLAGIAPPDVRREVAANGERKKVEHCESHPLHGYHPPPTRLKSRKGFMRTTTPLDVPPAAARVSLWAAKPGNSNWMAPQEGLPPGANQEWATWKSLNRLRSGVGRSKDNLARWHYLEESSTLCDCGAEQTTQHMYACPQCPASCTEEELFKATDNAVAVARFWSKTI

SEQ ID NO: 105 - protein, 982 aa, synthetic construct
MDEYQRSLSRPLLTIMSINIEGLSLAKEELLAKMSEDISCDILCIQETHRDITMRRPKILGMQLAVERPHRQYGSAIFVRSGVAISATSLTEVNNIEILSVELDSCTVSSLYKPPGADFYFTPPTSCHNHEAHFVVGDFNSHSCVWGYDEDDRNGEAVLTWADNSRMSLLHDSKLPPSFNSGRWKRGYNPDLIFVKESISHQCTKRVLNPIPNTQHRPICCVAYAAVRPKSVPFRRRFNFNKANWTKFTETLEAAISDIEPSIENYDLFVEAVKRSSRLSIPRGCRTSYLPGLNEESLNQLQEYLRLFQENPYSDGTIAAGQKLSTALANAKKDRWIELLENLDMSKSSRKAWQLLRRLDSDPLVNPGHANVTPDQIAHQLIQNGKTNCSRIKMKINRVPELETHQLSSPLNLKELREAIKRCKTGKAPGLDDLMMEQIKHLGPKAENWLLKFYNQCLAHKQIPRAWRKTKIIARLKPGKDASNARNYRPISLLCHLYKVYERMLLNRLGPVIEPKLIAQQAGFRPGKNCTGQILHLTEHIEEGYEKGCITGTVFVDLTAAYDTVQHRKMLHKVYHITRDFDFTKTVQTLLENRSFYVEFQGQKSRWRRQKNGLPQGSVLAPTLFNIFTNDQPQPPLTKSFIYADDLGLTTQAKDFETVEKQLTNALKDLSSYYKENHLKPNPAKTQVCAFHLRNREANRKLKVTWEGQELEHCFHPKYLGVTLDRTLTYRKHCMNTKHKVAARNNILRKLTGSAWGADPQVIRTSALALSFSTAEYACPVWHKSAHAKQVDIALNETCRIITGCLKPTPVDKLYKLAGIAPPDVRREVAANGERKKVEHCESHPLHGYHPPPTRLKSRKGFMRTTTPLDVPPAAARVSLWAAKPGNSNWMAPQEGLPPGANQEWATWKSLNRLRSGVGRSKDNLARWHYLEESSTLCDCGAEQTTQHMYACPQCPASCTEEELFKATDNAVAVARFWSKTI

SEQ ID NO: 106 - protein, 982 aa, synthetic construct
MDEYQRSLSRPLLTIMSINIEGLSQAKEELLAKMSEDISCDILCIQETHRDITMRRPKILGMQLAVERPHRQYGSAIFVRSGVAISATSLTEVNNIEILSVELDSCTVSSLYKPPGADFYFTPPTSCHNHEAHFVVGDFNSHSCVWGYDEDDRNGEAVLTWADNSRMSLLHDSKLPPSFNSGRWKRGYNPDLIFVKESISHQCTKRVLNPIPNTQHRPICCVAYAAVRPKSVPFRRRFNFNKANWTKFTETLEAAISDIEPSIENYDLFVEAVKRSSRLSIPRGCRTSYLPGLNEESLNQLQEYLRLFQENPYSDGTIAAGQKLSTALANAKKDRWIELLENLDMSKSSRKAWQLLRRLDSDPLVNPGHANVTPDQIAHQLIQNGKTNCSRIKMKINRVPELETHQLSSPLNLKELREAIKRCKTGKAPGLDDLMMEQIKHLGPKAENWLLKFYNQCLAHKQIPRAWRKTKIIAILKPGKDASNARNYRPISLLCHLYKVYERMLLNRLGPVIEPKLIAQQAGFRPGKNCTGQILHLTEHIEEGYEKGCITGTVFVDLTAAYDTVQHRKMLHKVYHITRDFDFTKTVQTLLENRSFYVEFQGQKSRWRRQKNGLPQGSVLAPTLFNIFTNDQPQPPLTKSFIYADDLGLTTQAKDFETVEKQLTNALKDLSSYYKENHLKPNPAKTQVCAFHLRNREANRKLKVTWEGQELEHCFHPKYLGVTLDRTLTYRKHCMNTKHKVAARNNILRKLTGSAWGADPQVIRTSALALSFSTAEYACPVWHKSAHAKQVDIALNETCRIITGCLKPTPVDKLYKLAGIAPPDVRREVAANGERKKVEHCESHPLHGYHPPPTRLKSRKGFMRTTTPLDVPPAAARVSLWAAKPGNSNWMAPQEGLPPGANQEWATWKSLNRLRSGVGRSKDNLARWHYLEESSTLCDCGAEQTTQHMYACPQCPASCTEEELFKATDNAVAVARFWSKTI

SEQ ID NO: 107 - protein, 982 aa, synthetic construct
MDEYQRSLSRPLLTIMSINIEGLSLAKEELLAKMSEDIKCDILCIQETHRDITMRRPKILGMQLAVERPHRQYGSAIFVRSGVAISATSLTEVNNIEILSVELDSCTVSSLYKPPGADFYFTPPTSCHNHEAHFVVGDFNSHSCVWGYDEDDRNGEAVLTWADNSRMSLLHDSKLPPSFNSGRWKRGYNPDLIFVKESISHQCTKRVLNPIPNTQHRPICCVAYAAVRPKSVPFRRRFNFNKANWTKFTETLEAAISDIEPSIENYDLFVEAVKRSSRLSIPRGCRTSYLPGLNEESLNQLQEYLRLFQENPYSDGTIAAGQKLSTALANAKKDRWIELLENLDMSKSSRKAWQLLRRLDSDPLVNPGHANVTPDQIAHQLIQNGKTNCSRIKMKINRVPELETHQLSSPLNLKELREAIKRCKTGKAPGLDDLMMEQIKHLGPKAENWLLKFYNQCLAHKQIPRAWRKTKIIAILKPGKDASNARNYRPISLLCHLYKVYERMLLNRLGPVIEPKLIAQQAGFRPGKNCTGQILHLTEHIEEGYEKGCITGTVFVDLTAAYDTVQHRKMLHKVYHITRDFDFTKTVQTLLENRSFYVEFQGQKSRWRRQKNGLPQGSVLAPTLFNIFTNDQPQPPLTKSFIYADDLGLTTQAKDFETVEKQLTNALKDLSSYYKENHLKPNPAKTQVCAFHLRNREANRKLKVTWEGQELEHCFHPKYLGVTLDRTLTYRKHCMNTKHKVAARNNILRKLTGSAWGADPQVIRTSALALSFSTAEYACPVWHKSAHAKQVDIALNETCRIITGCLKPTPVDKLYKLAGIAPPDVRREVAANGERKKVEHCESHPLHGYHPPPTRLKSRKGFMRTTTPLDVPPAAARVSLWAAKPGNSNWMAPQEGLPPGANQEWATWKSLNRLRSGVGRSKDNLARWHYLEESSTLCDCGAEQTTQHMYACPQCPASCTEEELFKATDNAVAVARFWSKTI

SEQ ID NO: 108 - protein, 982 aa, synthetic construct
MDEYQRSLSRPLLTIMSINIEGLSLAKEELLAKMSEDISCDILCIQETHRDETMRRPKILGMQLAVERPHRQYGSAIFVRSGVAISATSLTEVNNIEILSVELDSCTVSSLYKPPGADFYFTPPTSCHNHEAHFVVGDFNSHSCVWGYDEDDRNGEAVLTWADNSRMSLLHDSKLPPSFNSGRWKRGYNPDLIFVKESISHQCTKRVLNPIPNTQHRPICCVAYAAVRPKSVPFRRRFNFNKANWTKFTETLEAAISDIEPSIENYDLFVEAVKRSSRLSIPRGCRTSYLPGLNEESLNQLQEYLRLFQENPYSDGTIAAGQKLSTALANAKKDRWIELLENLDMSKSSRKAWQLLRRLDSDPLVNPGHANVTPDQIAHQLIQNGKTNCSRIKMKINRVPELETHQLSSPLNLKELREAIKRCKTGKAPGLDDLMMEQIKHLGPKAENWLLKFYNQCLAHKQIPRAWRKTKIIAILKPGKDASNARNYRPISLLCHLYKVYERMLLNRLGPVIEPKLIAQQAGFRPGKNCTGQILHLTEHIEEGYEKGCITGTVFVDLTAAYDTVQHRKMLHKVYHITRDFDFTKTVQTLLENRSFYVEFQGQKSRWRRQKNGLPQGSVLAPTLFNIFTNDQPQPPLTKSFIYADDLGLTTQAKDFETVEKQLTNALKDLSSYYKENHLKPNPAKTQVCAFHLRNREANRKLKVTWEGQELEHCFHPKYLGVTLDRTLTYRKHCMNTKHKVAARNNILRKLTGSAWGADPQVIRTSALALSFSTAEYACPVWHKSAHAKQVDIALNETCRIITGCLKPTPVDKLYKLAGIAPPDVRREVAANGERKKVEHCESHPLHGYHPPPTRLKSRKGFMRTTTPLDVPPAAARVSLWAAKPGNSNWMAPQEGLPPGANQEWATWKSLNRLRSGVGRSKDNLARWHYLEESSTLCDCGAEQTTQHMYACPQCPASCTEEELFKATDNAVAVARFWSKTI

SEQ ID NO: 109 - protein, 982 aa, synthetic construct
MDEYQRSLSRPLLTIMSINIEGLSLAKEELLAKMSEDISCDILCIQETHRDITMRRPKILGMTLAVERPHRQYGSAIFVRSGVAISATSLTEVNNIEILSVELDSCTVSSLYKPPGADFYFTPPTSCHNHEAHFVVGDFNSHSCVWGYDEDDRNGEAVLTWADNSRMSLLHDSKLPPSFNSGRWKRGYNPDLIFVKESISHQCTKRVLNPIPNTQHRPICCVAYAAVRPKSVPFRRRFNFNKANWTKFTETLEAAISDIEPSIENYDLFVEAVKRSSRLSIPRGCRTSYLPGLNEESLNQLQEYLRLFQENPYSDGTIAAGQKLSTALANAKKDRWIELLENLDMSKSSRKAWQLLRRLDSDPLVNPGHANVTPDQIAHQLIQNGKTNCSRIKMKINRVPELETHQLSSPLNLKELREAIKRCKTGKAPGLDDLMMEQIKHLGPKAENWLLKFYNQCLAHKQIPRAWRKTKIIAILKPGKDASNARNYRPISLLCHLYKVYERMLLNRLGPVIEPKLIAQQAGFRPGKNCTGQILHLTEHIEEGYEKGCITGTVFVDLTAAYDTVQHRKMLHKVYHITRDFDFTKTVQTLLENRSFYVEFQGQKSRWRRQKNGLPQGSVLAPTLFNIFTNDQPQPPLTKSFIYADDLGLTTQAKDFETVEKQLTNALKDLSSYYKENHLKPNPAKTQVCAFHLRNREANRKLKVTWEGQELEHCFHPKYLGVTLDRTLTYRKHCMNTKHKVAARNNILRKLTGSAWGADPQVIRTSALALSFSTAEYACPVWHKSAHAKQVDIALNETCRIITGCLKPTPVDKLYKLAGIAPPDVRREVAANGERKKVEHCESHPLHGYHPPPTRLKSRKGFMRTTTPLDVPPAAARVSLWAAKPGNSNWMAPQEGLPPGANQEWATWKSLNRLRSGVGRSKDNLARWHYLEESSTLCDCGAEQTTQHMYACPQCPASCTEEELFKATDNAVAVARFWSKTI

SEQ ID NO: 110 - protein, 982 aa, synthetic construct
MDEYQRSLSRPLLTIMSINIEGLSLAKEELLAKMSEDISCDILCIQETHRDITMRRPKILGMQLAVERPHRQYGSAIFVRSGVAISATQLTEVNNIEILSVELDSCTVSSLYKPPGADFYFTPPTSCHNHEAHFVVGDFNSHSCVWGYDEDDRNGEAVLTWADNSRMSLLHDSKLPPSFNSGRWKRGYNPDLIFVKESISHQCTKRVLNPIPNTQHRPICCVAYAAVRPKSVPFRRRFNFNKANWTKFTETLEAAISDIEPSIENYDLFVEAVKRSSRLSIPRGCRTSYLPGLNEESLNQLQEYLRLFQENPYSDGTIAAGQKLSTALANAKKDRWIELLENLDMSKSSRKAWQLLRRLDSDPLVNPGHANVTPDQIAHQLIQNGKTNCSRIKMKINRVPELETHQLSSPLNLKELREAIKRCKTGKAPGLDDLMMEQIKHLGPKAENWLLKFYNQCLAHKQIPRAWRKTKIIAILKPGKDASNARNYRPISLLCHLYKVYERMLLNRLGPVIEPKLIAQQAGFRPGKNCTGQILHLTEHIEEGYEKGCITGTVFVDLTAAYDTVQHRKMLHKVYHITRDFDFTKTVQTLLENRSFYVEFQGQKSRWRRQKNGLPQGSVLAPTLFNIFTNDQPQPPLTKSFIYADDLGLTTQAKDFETVEKQLTNALKDLSSYYKENHLKPNPAKTQVCAFHLRNREANRKLKVTWEGQELEHCFHPKYLGVTLDRTLTYRKHCMNTKHKVAARNNILRKLTGSAWGADPQVIRTSALALSFSTAEYACPVWHKSAHAKQVDIALNETCRIITGCLKPTPVDKLYKLAGIAPPDVRREVAANGERKKVEHCESHPLHGYHPPPTRLKSRKGFMRTTTPLDVPPAAARVSLWAAKPGNSNWMAPQEGLPPGANQEWATWKSLNRLRSGVGRSKDNLARWHYLEESSTLCDCGAEQTTQHMYACPQCPASCTEEELFKATDNAVAVARFWSKTI

SEQ ID NO: 111 - protein, 982 aa, synthetic construct
MDEYQRSLSRPLLTIMSINIEGLSLAKEELLAKMSEDISCDILCIQETHRDITMRRPKILGMQLAVERPHRQYGSAIFVRSGVAISATSLTEVNNIEILSVELDSCTVSSLYKPPNADFYFTPPTSCHNHEAHFVVGDFNSHSCVWGYDEDDRNGEAVLTWADNSRMSLLHDSKLPPSFNSGRWKRGYNPDLIFVKESISHQCTKRVLNPIPNTQHRPICCVAYAAVRPKSVPFRRRFNFNKANWTKFTETLEAAISDIEPSIENYDLFVEAVKRSSRLSIPRGCRTSYLPGLNEESLNQLQEYLRLFQENPYSDGTIAAGQKLSTALANAKKDRWIELLENLDMSKSSRKAWQLLRRLDSDPLVNPGHANVTPDQIAHQLIQNGKTNCSRIKMKINRVPELETHQLSSPLNLKELREAIKRCKTGKAPGLDDLMMEQIKHLGPKAENWLLKFYNQCLAHKQIPRAWRKTKIIAILKPGKDASNARNYRPISLLCHLYKVYERMLLNRLGPVIEPKLIAQQAGFRPGKNCTGQILHLTEHIEEGYEKGCITGTVFVDLTAAYDTVQHRKMLHKVYHITRDFDFTKTVQTLLENRSFYVEFQGQKSRWRRQKNGLPQGSVLAPTLFNIFTNDQPQPPLTKSFIYADDLGLTTQAKDFETVEKQLTNALKDLSSYYKENHLKPNPAKTQVCAFHLRNREANRKLKVTWEGQELEHCFHPKYLGVTLDRTLTYRKHCMNTKHKVAARNNILRKLTGSAWGADPQVIRTSALALSFSTAEYACPVWHKSAHAKQVDIALNETCRIITGCLKPTPVDKLYKLAGIAPPDVRREVAANGERKKVEHCESHPLHGYHPPPTRLKSRKGFMRTTTPLDVPPAAARVSLWAAKPGNSNWMAPQEGLPPGANQEWATWKSLNRLRSGVGRSKDNLARWHYLEESSTLCDCGAEQTTQHMYACPQCPASCTEEELFKATDNAVAVARFWSKTI

SEQ ID NO: 112 - protein, 982 aa, synthetic construct
MDEYQRSLSRPLLTIMSINIEGLSLAKEELLAKMSEDISCDILCIQETHRDITMRRPKILGMQLAVERPHRQYGSAIFVRSGVAISATSLTEVNNIEILSVELDSCTVSSLYKPPGADFYFTPPTSCHNHETHFVVGDFNSHSCVWGYDEDDRNGEAVLTWADNSRMSLLHDSKLPPSFNSGRWKRGYNPDLIFVKESISHQCTKRVLNPIPNTQHRPICCVAYAAVRPKSVPFRRRFNFNKANWTKFTETLEAAISDIEPSIENYDLFVEAVKRSSRLSIPRGCRTSYLPGLNEESLNQLQEYLRLFQENPYSDGTIAAGQKLSTALANAKKDRWIELLENLDMSKSSRKAWQLLRRLDSDPLVNPGHANVTPDQIAHQLIQNGKTNCSRIKMKINRVPELETHQLSSPLNLKELREAIKRCKTGKAPGLDDLMMEQIKHLGPKAENWLLKFYNQCLAHKQIPRAWRKTKIIAILKPGKDASNARNYRPISLLCHLYKVYERMLLNRLGPVIEPKLIAQQAGFRPGKNCTGQILHLTEHIEEGYEKGCITGTVFVDLTAAYDTVQHRKMLHKVYHITRDFDFTKTVQTLLENRSFYVEFQGQKSRWRRQKNGLPQGSVLAPTLFNIFTNDQPQPPLTKSFIYADDLGLTTQAKDFETVEKQLTNALKDLSSYYKENHLKPNPAKTQVCAFHLRNREANRKLKVTWEGQELEHCFHPKYLGVTLDRTLTYRKHCMNTKHKVAARNNILRKLTGSAWGADPQVIRTSALALSFSTAEYACPVWHKSAHAKQVDIALNETCRIITGCLKPTPVDKLYKLAGIAPPDVRREVAANGERKKVEHCESHPLHGYHPPPTRLKSRKGFMRTTTPLDVPPAAARVSLWAAKPGNSNWMAPQEGLPPGANQEWATWKSLNRLRSGVGRSKDNLARWHYLEESSTLCDCGAEQTTQHMYACPQCPASCTEEELFKATDNAVAVARFWSKTI

SEQ ID NO: 113 - protein, 982 aa, synthetic construct
MDEYQRSLSRPLLTIMSINIEGLSLAKEELLAKMSEDISCDILCIQETHRDITMRRPKILGMQLAVERPHRQYGSAIFVRSGVAISATSLTEVNNIEILSVELDSCTVSSLYKPPGADFYFTPPTSCHNHEAHFVVGDFNSHSCSWGYDEDDRNGEAVLTWADNSRMSLLHDSKLPPSFNSGRWKRGYNPDLIFVKESISHQCTKRVLNPIPNTQHRPICCVAYAAVRPKSVPFRRRFNFNKANWTKFTETLEAAISDIEPSIENYDLFVEAVKRSSRLSIPRGCRTSYLPGLNEESLNQLQEYLRLFQENPYSDGTIAAGQKLSTALANAKKDRWIELLENLDMSKSSRKAWQLLRRLDSDPLVNPGHANVTPDQIAHQLIQNGKTNCSRIKMKINRVPELETHQLSSPLNLKELREAIKRCKTGKAPGLDDLMMEQIKHLGPKAENWLLKFYNQCLAHKQIPRAWRKTKIIAILKPGKDASNARNYRPISLLCHLYKVYERMLLNRLGPVIEPKLIAQQAGFRPGKNCTGQILHLTEHIEEGYEKGCITGTVFVDLTAAYDTVQHRKMLHKVYHITRDFDFTKTVQTLLENRSFYVEFQGQKSRWRRQKNGLPQGSVLAPTLFNIFTNDQPQPPLTKSFIYADDLGLTTQAKDFETVEKQLTNALKDLSSYYKENHLKPNPAKTQVCAFHLRNREANRKLKVTWEGQELEHCFHPKYLGVTLDRTLTYRKHCMNTKHKVAARNNILRKLTGSAWGADPQVIRTSALALSFSTAEYACPVWHKSAHAKQVDIALNETCRIITGCLKPTPVDKLYKLAGIAPPDVRREVAANGERKKVEHCESHPLHGYHPPPTRLKSRKGFMRTTTPLDVPPAAARVSLWAAKPGNSNWMAPQEGLPPGANQEWATWKSLNRLRSGVGRSKDNLARWHYLEESSTLCDCGAEQTTQHMYACPQCPASCTEEELFKATDNAVAVARFWSKTI

SEQ ID NO: 114 - protein, 982 aa, synthetic construct
MDEYQRSLSRPLLTIMSINIEGLSLAKEELLAKMSEDISCDILCIQETHRDITMRRPKILGMQLAVERPHRQYGSAIFVRSGVAISATSLTEVNNIEILSVELDSCTVSSLYKPPGADFYFTPPTSCHNHEAHFVVGDFNSHSCVWGYDEDDRNGEAVLTWADNSRMSLLHDSKLPPSFNSGRWKRGYNPDLIFVWESISHQCTKRVLNPIPNTQHRPICCVAYAAVRPKSVPFRRRFNFNKANWTKFTETLEAAISDIEPSIENYDLFVEAVKRSSRLSIPRGCRTSYLPGLNEESLNQLQEYLRLFQENPYSDGTIAAGQKLSTALANAKKDRWIELLENLDMSKSSRKAWQLLRRLDSDPLVNPGHANVTPDQIAHQLIQNGKTNCSRIKMKINRVPELETHQLSSPLNLKELREAIKRCKTGKAPGLDDLMMEQIKHLGPKAENWLLKFYNQCLAHKQIPRAWRKTKIIAILKPGKDASNARNYRPISLLCHLYKVYERMLLNRLGPVIEPKLIAQQAGFRPGKNCTGQILHLTEHIEEGYEKGCITGTVFVDLTAAYDTVQHRKMLHKVYHITRDFDFTKTVQTLLENRSFYVEFQGQKSRWRRQKNGLPQGSVLAPTLFNIFTNDQPQPPLTKSFIYADDLGLTTQAKDFETVEKQLTNALKDLSSYYKENHLKPNPAKTQVCAFHLRNREANRKLKVTWEGQELEHCFHPKYLGVTLDRTLTYRKHCMNTKHKVAARNNILRKLTGSAWGADPQVIRTSALALSFSTAEYACPVWHKSAHAKQVDIALNETCRIITGCLKPTPVDKLYKLAGIAPPDVRREVAANGERKKVEHCESHPLHGYHPPPTRLKSRKGFMRTTTPLDVPPAAARVSLWAAKPGNSNWMAPQEGLPPGANQEWATWKSLNRLRSGVGRSKDNLARWHYLEESSTLCDCGAEQTTQHMYACPQCPASCTEEELFKATDNAVAVARFWSKTI

SEQ ID NO: 115 - protein, 982 aa, synthetic construct
MDEYQRSLSRPLLTIMSINIEGLSLAKEELLAKMSEDISCDILCIQETHRDITMRRPKILGMQLAVERPHRQYGSAIFVRSGVAISATSLTEVNNIEILSVELDSCTVSSLYKPPGADFYFTPPTSCHNHEAHFVVGDFNSHSCVWGYDEDDRNGEAVLTWADNSRMSLLHDSKLPPSFNSGRWKRGYNPDLIFVKESISHQCTKRVLNPIPNTQHRPICCVAYAAVRPKSVPFRRRFNFNKANWTKFTETLEAAISDIEPSIENYDLFVEAVKRSSRLSIPRGCRTSYLPGLNEESLKQLQEYLRLFQENPYSDGTIAAGQKLSTALANAKKDRWIELLENLDMSKSSRKAWQLLRRLDSDPLVNPGHANVTPDQIAHQLIQNGKTNCSRIKMKINRVPELETHQLSSPLNLKELREAIKRCKTGKAPGLDDLMMEQIKHLGPKAENWLLKFYNQCLAHKQIPRAWRKTKIIAILKPGKDASNARNYRPISLLCHLYKVYERMLLNRLGPVIEPKLIAQQAGFRPGKNCTGQILHLTEHIEEGYEKGCITGTVFVDLTAAYDTVQHRKMLHKVYHITRDFDFTKTVQTLLENRSFYVEFQGQKSRWRRQKNGLPQGSVLAPTLFNIFTNDQPQPPLTKSFIYADDLGLTTQAKDFETVEKQLTNALKDLSSYYKENHLKPNPAKTQVCAFHLRNREANRKLKVTWEGQELEHCFHPKYLGVTLDRTLTYRKHCMNTKHKVAARNNILRKLTGSAWGADPQVIRTSALALSFSTAEYACPVWHKSAHAKQVDIALNETCRIITGCLKPTPVDKLYKLAGIAPPDVRREVAANGERKKVEHCESHPLHGYHPPPTRLKSRKGFMRTTTPLDVPPAAARVSLWAAKPGNSNWMAPQEGLPPGANQEWATWKSLNRLRSGVGRSKDNLARWHYLEESSTLCDCGAEQTTQHMYACPQCPASCTEEELFKATDNAVAVARFWSKTI

SEQ ID NO: 116 - protein, 982 aa, synthetic construct
MDEYQRSLSRPLLTIMSINIEGLSLAKEELLAKMSEDISCDILCIQETHRDITMRRPKILGMQLAVERPHRQYGSAIFVRSGVAISATSLTEVNNIEILSVELDSCTVSSLYKPPGADFYFTPPTSCHNHEAHFVVGDFNSHSCVWGYDEDDRNGEAVLTWADNSRMSLLHDSKLPPSFNSGRWKRGYNPDLIFVKESISHQCTKRVLNPIPNTQHRPICCVAYAAVRPKSVPFRRRFNFNKANWTKFTETLEAAISDIEPSIENYDLFVEAVKRSSRLSIPRGCRTSYLPGLNEESLNQLKEYLRLFQENPYSDGTIAAGQKLSTALANAKKDRWIELLENLDMSKSSRKAWQLLRRLDSDPLVNPGHANVTPDQIAHQLIQNGKTNCSRIKMKINRVPELETHQLSSPLNLKELREAIKRCKTGKAPGLDDLMMEQIKHLGPKAENWLLKFYNQCLAHKQIPRAWRKTKIIAILKPGKDASNARNYRPISLLCHLYKVYERMLLNRLGPVIEPKLIAQQAGFRPGKNCTGQILHLTEHIEEGYEKGCITGTVFVDLTAAYDTVQHRKMLHKVYHITRDFDFTKTVQTLLENRSFYVEFQGQKSRWRRQKNGLPQGSVLAPTLFNIFTNDQPQPPLTKSFIYADDLGLTTQAKDFETVEKQLTNALKDLSSYYKENHLKPNPAKTQVCAFHLRNREANRKLKVTWEGQELEHCFHPKYLGVTLDRTLTYRKHCMNTKHKVAARNNILRKLTGSAWGADPQVIRTSALALSFSTAEYACPVWHKSAHAKQVDIALNETCRIITGCLKPTPVDKLYKLAGIAPPDVRREVAANGERKKVEHCESHPLHGYHPPPTRLKSRKGFMRTTTPLDVPPAAARVSLWAAKPGNSNWMAPQEGLPPGANQEWATWKSLNRLRSGVGRSKDNLARWHYLEESSTLCDCGAEQTTQHMYACPQCPASCTEEELFKATDNAVAVARFWSKTI

SEQ ID NO: 117 - protein, 982 aa, synthetic construct
MDEYQRSLSRPLLTIMSINIEGLSLAKEELLAKMSEDISCDILCIQETHRDITMRRPKILGMQLAVERPHRQYGSAIFVRSGVAISATSLTEVNNIEILSVELDSCTVSSLYKPPGADFYFTPPTSCHNHEAHFVVGDFNSHSCVWGYDEDDRNGEAVLTWADNSRMSLLHDSKLPPSFNSGRWKRGYNPDLIFVKESISHQCTKRVLNPIPNTQHRPICCVAYAAVRPKSVPFRRRFNFNKANWTKFTETLEAAISDIEPSIENYDLFVEAVKRSSRLSIPRGCRTSYLPGLNEESLNQLQEYLRLFQENPYSDGTIAAGQKLSTALSNAKKDRWIELLENLDMSKSSRKAWQLLRRLDSDPLVNPGHANVTPDQIAHQLIQNGKTNCSRIKMKINRVPELETHQLSSPLNLKELREAIKRCKTGKAPGLDDLMMEQIKHLGPKAENWLLKFYNQCLAHKQIPRAWRKTKIIAILKPGKDASNARNYRPISLLCHLYKVYERMLLNRLGPVIEPKLIAQQAGFRPGKNCTGQILHLTEHIEEGYEKGCITGTVFVDLTAAYDTVQHRKMLHKVYHITRDFDFTKTVQTLLENRSFYVEFQGQKSRWRRQKNGLPQGSVLAPTLFNIFTNDQPQPPLTKSFIYADDLGLTTQAKDFETVEKQLTNALKDLSSYYKENHLKPNPAKTQVCAFHLRNREANRKLKVTWEGQELEHCFHPKYLGVTLDRTLTYRKHCMNTKHKVAARNNILRKLTGSAWGADPQVIRTSALALSFSTAEYACPVWHKSAHAKQVDIALNETCRIITGCLKPTPVDKLYKLAGIAPPDVRREVAANGERKKVEHCESHPLHGYHPPPTRLKSRKGFMRTTTPLDVPPAAARVSLWAAKPGNSNWMAPQEGLPPGANQEWATWKSLNRLRSGVGRSKDNLARWHYLEESSTLCDCGAEQTTQHMYACPQCPASCTEEELFKATDNAVAVARFWSKTI

SEQ ID NO: 118 - protein, 982 aa, synthetic construct
MDEYQRSLSRPLLTIMSINIEGLSLAKEELLAKMSEDISCDILCIQETHRDITMRRPKILGMQLAVERPHRQYGSAIFVRSGVAISATSLTEVNNIEILSVELDSCTVSSLYKPPGADFYFTPPTSCHNHEAHFVVGDFNSHSCVWGYDEDDRNGEAVLTWADNSRMSLLHDSKLPPSFNSGRWKRGYNPDLIFVKESISHQCTKRVLNPIPNTQHRPICCVAYAAVRPKSVPFRRRFNFNKANWTKFTETLEAAISDIEPSIENYDLFVEAVKRSSRLSIPRGCRTSYLPGLNEESLNQLQEYLRLFQENPYSDGTIAAGQKLSTALANAKKDRWIELLENLDMSKSSRKAWQLLRRLDSDPLVNPGHANVTPDQIAHQLIQNGKTNCSRIKMKINRVPELETHQLSSPLNLKELREAIKRCKTGKAPGLDDLMMEQIKHLGPKAENWLLKFYNQCLAHKQIPRAWRKTKIIAILKPGKDASNARNYRPISLLCHLYKVYERMLLNRLGPVIEPKLIAQQAGFRPGKNCTGQILHLTEHIEEGYEKGCITGTVFVDLTAAYDTVQHRKMLHKVYHITRDFDFTKTVQTLLENRSFYVEFQGQKSRWRRQKNGLPQGSVLAPTLFNIFTNDQPQPPLTKSFIYADDLGLTTQAKDFETVEKQLTNALKDLSSYYKENHLKPNPAKTQVCAFHLRNREANRKLKVTWEGQELEHCFHPKYLGVTLDRTLTYRKHCMNTKHKVAARNNILRKLTGSAWGADPQVIRTSALALSFSTAEYACPVWHKSAHAKQVDIALNETCRIITGCLKPTPVDKLYKLAGIAPPDVRREVAANGERKKVEHCESHPLHGYHPPPTRLKSRKGFMRTTTPLDVPPAAARVSLWAAKPGNSNWMAPQEGLPPGANQEWATWKSLNRLRSGVGRSKDNLARWHYLERSSTLCDCGAEQTTQHMYACPQCPASCTEEELFKATDNAVAVARFWSKTI

SEQ ID NO: 119 - protein, 982 aa, synthetic construct
MDEYQRSLSRPLLTIMSINIEGLSLAKEELLAKMSEDISCDILCIQETHRDITMRRPKILGMQLAVERPHRQYGSAIFVRSGVAISATSLTEVNNIEILSVELDSCTVSSLYKPPGADFYFTPPTSCHNHEAHFVVGDFNSHSCVWGYDEDDRNGEAVLTWADNSRMSLLHDSKLPPSFNSGRWKRGYNPDLIFVKESISHQCTKRVLNPIPNTQHRPICCVAYAAVRPKSVPFRRRFNFNKANWTKFTETLEAAISDIEPSIENYDLFVEAVKRSSRLSIPRGCRTSYLPGLNEESLNQLQEYLRLFQENPYSDGTIAAGQKLSTALANAKKDRWIELLENLDMSKSSRKAWQLLRRLDSDPLVNPGHANVTPDQIAHQLIQNGKTNCSRIKMKINRVPELETHQLSSPLNLKELREAIKRCKTGKAPGLDDLMMEQIKHLGPKAENWLLKFYNQCLAHKQIPRAWRKTKIIAILKPGKDASNARNYRPISLLCHLYKVYERMLLNRLGPVIEPKLIAQQAGFRPGKNCTGQILHLTEHIEEGYEKGCITGTVFVDLTAAYDTVQHRKMLHKVYHITRDFDFTKTVQTLLENRSFYVEFQGQKSRWRRQKNGLPQGSVLAPTLFNIFTNDQPQPPLTKSFIYADDLGLTTQAKDFETVEKQLTNALKDLSSYYKENHLKPNPAKTQVCAFHLRNREANRKLRVTWEGQELEHCFHPKYLGVTLDRTLTYRKHCMNTKHKVAARNNILRKLTGSAWGADPQVIRTSALALSFSTAEYACPVWHKSAHAKQVDIALNETCRIITGCLKPTPVDKLYKLAGIAPPDVRREVAANGERKKVEHCESHPLHGYHPPPTRLKSRKGFMRTTTPLDVPPAAARVSLWAAKPGNSNWMAPQEGLPPGANQEWATWKSLNRLRSGVGRSKDNLARWHYLEESSTLCDCGAEQTTQHMYACPQCPASCTEEELFKATDNAVAVARFWSKTI

SEQ ID NO: 120 - protein, 982 aa, synthetic construct
MDEYQRSLSRPLLTIMSINIEGLSLAKEELLAKMSEDISCDILCIQETHRDITMRRPKILGMQLAVERPHRQYGSAIFVRSGVAISATSLTEVNNIEILSVELDSCTVSSLYKPPGADFYFTPPTSCHNHEAHFVVGDFNSHSCVWGYDEDDRNGEAVLTWADNSRMSLLHDSKLPPSFNSGRWKRGYNPDLIFVKESISHQCTKRVLNPIPNTQHRPICCVAYAAVRPKSVPFRRRFNFNKANWTKFTETLEAAISDIEPSIENYDLFVEAVKRSSRLSIPRGCRTSYLPGLNEESLNQLQEYLRLFQENPYSDGTIAAGQKLSTALANAKKDRWIELLENLDMSKSSRKAWQLLRRLDSDPLVNPGHANVTPDQIAHQLIQNGKTNCSRIKMKINRVPELETHQLSSPLNLKELREAIKRCKTGKAPGLDDLMMEQIKHLGPKAENWLLKFYNQCLAHKQIPRAWRKTKIIAILKPGQDASNARNYRPISLLCHLYKVYERMLLNRLGPVIEPKLIAQQAGFRPGKNCTGQILHLTEHIEEGYEKGCITGTVFVDLTAAYDTVQHRKMLHKVYHITRDFDFTKTVQTLLENRSFYVEFQGQKSRWRRQKNGLPQGSVLAPTLFNIFTNDQPQPPLTKSFIYADDLGLTTQAKDFETVEKQLTNALKDLSSYYKENHLKPNPAKTQVCAFHLRNREANRKLKVTWEGQELEHCFHPKYLGVTLDRTLTYRKHCMNTKHKVAARNNILRKLTGSAWGADPQVIRTSALALSFSTAEYACPVWHKSAHAKQVDIALNETCRIITGCLKPTPVDKLYKLAGIAPPDVRREVAANGERKKVEHCESHPLHGYHPPPTRLKSRKGFMRTTTPLDVPPAAARVSLWAAKPGNSNWMAPQEGLPPGANQEWATWKSLNRLRSGVGRSKDNLARWHYLEESSTLCDCGAEQTTQHMYACPQCPASCTEEELFKATDNAVAVARFWSKTI

SEQ ID NO: 121 - protein, 982 aa, synthetic construct
MDEYQRSLSRPLLTIMSINIEGLSLAKEELLAKMSEDISCDILCIQETHRDITMRRPKILGMQLAVERPHRQYGSAIFVRSGVAISATSLTEVNNIEILSVELDSCTVSSLYKPPGADFYFTPPTSCHNHEAHFVVGDFNSHSCVWGYDEDDRNGEAVLTWADNSRMSLLHDSKLPPSFNSGRWKRGYNPDLIFVKESISHQCTKRVLNPIPNTQHRPICCVAYAAVRPKSVPFRRRFNFNKANWTKFTETLEAAISDIEPSIENYDLFVEAVKRSSRLSIPRGCRTSYLPGLNEESLNQLQEYLRLFQENPYSDGTIAAGQKLSTALANAKKDRWIELLENLDMSKSSRKAWQLLRRLDSDPLVNPGHANVTPDQIAHQLIQNGKTNCSRIKMKINRVPELETHQLSSPLNLKELREAIKRCKTGKAPGLDDLMMEQIKHLGPKAENWLLKFYNQCLAHKQIPRAWRKTKIIAILKPGKDASNARNYRPISLLCHLYKVYERMLLNRLGPVIEPKLIAQQAGFRPGKNCTGQILHLTEHIEEGYEKGCITGTVFVDLTAAYDTVQHRKMLHKVYHITRDFDFTKTVQTLLENRSFYVEFQGQKSRWRRQKNGLPQGSVLAPTLFNIFTNDQPQPPLTKSFIYADDLGLTTQAKDFETVEKQLTNALKDLSSYYRENHLKPNPAKTQVCAFHLRNREANRKLKVTWEGQELEHCFHPKYLGVTLDRTLTYRKHCMNTKHKVAARNNILRKLTGSAWGADPQVIRTSALALSFSTAEYACPVWHKSAHAKQVDIALNETCRIITGCLKPTPVDKLYKLAGIAPPDVRREVAANGERKKVEHCESHPLHGYHPPPTRLKSRKGFMRTTTPLDVPPAAARVSLWAAKPGNSNWMAPQEGLPPGANQEWATWKSLNRLRSGVGRSKDNLARWHYLEESSTLCDCGAEQTTQHMYACPQCPASCTEEELFKATDNAVAVARFWSKTI

SEQ ID NO: 122 - protein, 982 aa, synthetic construct
MDEYQRSLSRPLLTIMSINIEGLSLAKEELLAKMSEDISCDILCIQETHRDITMRRPKILGMQLAVERPHRQYGSAIFVRSGVAISATSLTEVNNIEILSVELDSCTVSSLYKPPGADFYFTPPTSCHNHEAHFVVGDFNSHSCVWGYDEDDRNGEAVLTWADNSRMSLLHDSKLPPSFNSGRWKRGYNPDLIFVKESISHQCTKRVLNPIPNTQHRPICCVAYAAVRPKSVPFRRRFNFNKANWTKFTETLEAAISDIEPSIENYDLFVEAVKRSSRLSIPRGCRTSYLPGLNEESLNQLQEYLRLFQENPYSDGTIAAGQKLSTALANAKKDRWIELLENLDMSKSSRKAWQLLRRLDSDPLVNPGHANVTPDQIAHQLIQNGKTNCSRIKMKINRVPELETHQLSSPLNLKELREAIKRCKTGKAPGLDDLMMEQIKHLGPKAENWLLKFYNQCLAHKQIPRAWRKTKIIAILKPGKDASNARNYRPISLLCHLYKVYERMLLNRLGPVIEPKLIAQQAGFRPGKNCTGQILHLTEHIEEGYEKGCITGTVFVDLTAAYDTVQHRKMLHKVYHITRDFDFTKTVQTLLENRSFYVEFQGQKSRWRRQKNGLPQGSVLAPTLFNIFTNDQPQPPLTKSFIYADDLGLTTQAKDFETVEKQLTNALKDLSSYYKENHLKPNPAKTQVCAFHLRNREANRKLKVTWEGQELEHCFHPKYLGVTLDRTLTYRKHCMNTKHKVAARNNILRKLTGSAWGADPQVIRTSALALSFSTAEYACPVWHKSAHARQVDIALNETCRIITGCLKPTPVDKLYKLAGIAPPDVRREVAANGERKKVEHCESHPLHGYHPPPTRLKSRKGFMRTTTPLDVPPAAARVSLWAAKPGNSNWMAPQEGLPPGANQEWATWKSLNRLRSGVGRSKDNLARWHYLEESSTLCDCGAEQTTQHMYACPQCPASCTEEELFKATDNAVAVARFWSKTI

SEQ ID NO: 123 - protein, 982 aa, synthetic construct
MDEYQRSLSRPLLTIMSINIEGLSLAKEELLAKMSEDISCDILCIQETHRDITMRRPKILGMQLAVERPHRQYGSAIFVRSGVAISATSLTEVNNIEILSVELDSCTVSSLYKPPGADFYFTPPTSCHNHEAHFVVGDFNSHSCVWGYDEDDRNGEAVLTWADNSRMSLLHDSKLPPSFNSGRWKRGYNPDLIFVKESISHQCTKRVLNPIPNTQHRPICCVAYAAVRPKSVPFRRRFNFNKANWTKFTETLEAAISDIEPSIENYDLFVEAVKRSSRLSIPRGCRTSYLPGLNEESLNQLQEYLRLFQENPYSDGTIAAGQKLSTALANAKKDRWIELLENLDMSKSSRKAWQLLRRLDSDPLVNPGHANVTPDQIAHQLIQNGKTNCSRIKMKINRVPELETHQLSSPLNLKELREAIKRCKTGKAPGLDDLMMEQIKHLGPKAENWLLKFYNQCLAHKQIPRAWRKTKIIAILKPGKDASNARNYRPISLLCHLYKVYERMLLNRLGPVIEPKLIAQQAGFRPGKNCTGQILHLTEHIEEGYEKGCITGTVFVDLTAAYDTVQHRKMLHKVYHITRDFDFTKTVQTLLENRSFYVEFQGQKSRWRRQKNGLPQGSVLAPTLFNIFTNDQPQPPLTKSFIYADDLGLTTQAKDFETVEKQLTNALKDLSSYYKENHLKPNPAKTQVCAFHLRNREANRKLKVTWEGQELEHCFHPKYLGVTLDRTLTYRKHCMNTKHKVAARNNILRKLTGSAWGADPQVIRTSALALSFSTAEYACPVWHKSARAKQVDIALNETCRIITGCLKPTPVDKLYKLAGIAPPDVRREVAANGERKKVEHCESHPLHGYHPPPTRLKSRKGFMRTTTPLDVPPAAARVSLWAAKPGNSNWMAPQEGLPPGANQEWATWKSLNRLRSGVGRSKDNLARWHYLEESSTLCDCGAEQTTQHMYACPQCPASCTEEELFKATDNAVAVARFWSKTI

SEQ ID NO: 124 - protein, 982 aa, synthetic construct
MDEYQRSLSRPLLTIMSINIEGLSLAKEELLAKMSEDISCDILCIQETHRDITMRRPKILGMQLAVERPHRQYGSAIFVRSGVAISATSLTEVNNIEILSVELDSCTVSSLYKPPGADFYFTPPTSCHNHEAHFVVGDFNSHSCVWGYDEDDRNGEAVLTWADNSRMSLLHDSKLPPSFNSGRWKRGYNPDLIFVKESISHQCTKRVLNPIPNTQHRPICCVAYAAVRPKSVPFRRRFNFNKANWTKFTETLEAAISDIEPSIENYDLFVEAVKRSSRLSIPRGCRTSYLPGLNEESLNQLQEYLRLFQENPYSDGTIAAGQKLSTALANAKKDRWIELLENLDMSKSSRKAWQLLRRLDSDPLVNPGHANVTPDQIAHQLIQNGKTNCSRIKMKINRVPELETHQLSSPLNLKELREAIKRCKTGKAPGLDDLMMEQIKHLGPKAENWLLKFYNQCLAHKQIPRAWRKTKIIAILKPGKDASNARNYRPISLLCHLYKVYERMLLNRLGPVIEPKLIAQQAGFRPGKNCTGQILHLTEHIEEGYEKGCITGTVFVDLTAAYDTVQHRKMLHKVYHITRDFDFTKTVQTLLENRSFYVEFQGQKSRWRRQKNGLPQGSVLAPTLFNIFTNDQPQPPLTKSFIYADDLGLTTQAKDFETVEKQLTNALKDLSSYYKENHLKPNPAKTQVCAFHLRNREANRKLKVTWEGQELEHCFHPKYLGVTLDRTLTYRKHCMNTKHKVAARNNILRKLTGSAWGADPQVIRTSALALSFSTAEYACPVWHKSAHAKQVDRALNETCRIITGCLKPTPVDKLYKLAGIAPPDVRREVAANGERKKVEHCESHPLHGYHPPPTRLKSRKGFMRTTTPLDVPPAAARVSLWAAKPGNSNWMAPQEGLPPGANQEWATWKSLNRLRSGVGRSKDNLARWHYLEESSTLCDCGAEQTTQHMYACPQCPASCTEEELFKATDNAVAVARFWSKTI

SEQ ID NO: 125 - protein, 982 aa, synthetic construct
MDEYQRSLSRPLLTIMSINIEGLSLAKEELLAKMSEDISCDILCIQETHRDITMRRPKILGMQLAVERPHRQYGSAIFVRSGVAISATSLTEVNNIEILSVELDSCTVSSLYKPPGADFYFTPPTSCHNHEAHFVVGDFNSHSCVWGYDEDDRNGEAVLTWADNSRMSLLHDSKLPPSFNSGRWKRGYNPDLIFVKESISHQCTKRVLNPIPNTQHRPICCVAYAAVRPKSVPFRRRFNFNKANWTKFTETLEAAISDIEPSIENYDLFVEAVKRSSRLSIPRGCRTSYLPGLNEESLNQLQEYLRLFQENPYSDGTIAAGQKLSTALANAKKDRWIELLENLDMSKSSRKAWQLLRRLDSDPLVNPGHANVTPDQIAHQLIQNGKTNCSRIKMKINRVPELETHQLSSPLNLKELREAIKRCKTGKAPGLDDLMMEQIKHLGPKAENWLLKFYNQCLAHKQIPRAWRKTKIIAILKPGKDASNARNYRPISLLCHLYKVYERMLLNRLGPVIEPKLIAQQAGFRPGKNCTGQILHLTEHIEEGYEKGCITGTVFVDLTAAYDTVQHRKMLHKVYHITRDFDFTKTVQTLLENRSFYVEFQGQKSRWRRQKNGLPQGSVLAPTLFNIFTNDQPQPPLTKSFIYADDLGLTTQAKDFETVEKQLTNALKDLSSYYKENHLKPNPAKTQVCAFHLRNREANRKLKVTWEGQELEHCFHPKYLGVTLDRTLTYRKHCMNTKHKVAARNNILRKLTGSAWGADPQVIRTSALALSFSTAEYACPVWHKSAHAKQVDIALNETCRIITGCLKKTPVDKLYKLAGIAPPDVRREVAANGERKKVEHCESHPLHGYHPPPTRLKSRKGFMRTTTPLDVPPAAARVSLWAAKPGNSNWMAPQEGLPPGANQEWATWKSLNRLRSGVGRSKDNLARWHYLEESSTLCDCGAEQTTQHMYACPQCPASCTEEELFKATDNAVAVARFWSKTI

SEQ ID NO: 126 - protein, 982 aa, synthetic construct
MDEYQRSLSRPLLTIMSINIEGLSLAKEELLAKMSEDISCDILCIQETHRDITMRRPKILGMQLAVERPHRQYGSAIFVRSGVAISATSLTEVNNIEILSVELDSCTVSSLYKPPGADFYFTPPTSCHNHEAHFVVGDFNSHSCVWGYDEDDRNGEAVLTWADNSRMSLLHDSKLPPSFNSGRWKRGYNPDLIFVKESISHQCTKRVLNPIPNTQHRPICCVAYAAVRPKSVPFRRRFNFNKANWTKFTETLEAAISDIEPSIENYDLFVEAVKRSSRLSIPRGCRTSYLPGLNEESLNQLQEYLRLFQENPYSDGTIAAGQKLSTALANAKKDRWIELLENLDMSKSSRKAWQLLRRLDSDPLVNPGHANVTPDQIAHQLIQNGKTNCSRIKMKINRVPELETHQLSSPLNLKELREAIKRCKTGKAPGLDDLMMEQIKHLGPKAENWLLKFYNQCLAHKQIPRAWRKTKIIAILKPGKDASNARNYRPISLLCHLYKVYERMLLNRLGPVIEPKLIAQQAGFRPGKNCTGQILHLTEHIEEGYEKGCITGTVFVDLTAAYDTVQHRKMLHKVYHITRDFDFTKTVQTLLENRSFYVEFQGQKSRWRRQKNGLPQGSVLAPTLFNIFTNDQPQPPLTKSFIYADDLGLTTQAKDFETVEKQLTNALKDLSSYYKENHLKPNPAKTQVCAFHLRNREANRKLKVTWEGQELEHCFHPKYLGVTLDRTLTYRKHCMNTKHKVAARNNILRKLTGSAWGADPQVIRTSALALSFSTAEYACPVWHKSAHAKQVKIALNETCRIITGCLKPTPVDKLYKLAGIAPPDVRREVAANGERKKVEHCESHPLHGYHPPPTRLKSRKGFMRTTTPLDVPPAAARVSLWAAKPGNSNWMAPQEGLPPGANQEWATWKSLNRLRSGVGRSKDNLARWHYLEESSTLCDCGAEQTTQHMYACPQCPASCTEEELFKATDNAVAVARFWSKTI

SEQ ID NO: 127 - protein, 982 aa, synthetic construct
MDEYQRSLSRPLLTIMSINIEGLSLAKEELLAKMSEDISCDILCIQETHRDITMRRPKILGMQLAVERPHRQYGSAIFVRSGVAISATSLTEVNNIEILSVELDSCTVSSLYKPPGADFYFTPPTSCHNHEAHFVVGDFNSHSCVWGYDEDDRNGEAVLTWADNSRMSLLHDSKLPPSFNSGRWKRGYNPDLIFVKESISHQCTKRVLNPIPNTQHRPICCVAYAAVRPKSVPFRRRFNFNKANWTKFTETLEAAISDIEPSIENYDLFVEAVKRSSRLSIPRGCRTSYLPGLNEESLNQLQEYLRLFQENPYSDGTIAAGQKLSTALANAKKDRWIELLENLDMSKSSRKAWQLLRRLDSDPLVNPGHANVTPDQIAHQLIQNGKTNCSRIKMKINRVPELETHQLSSPLNLKELREAIKRCKTGKAPGLDDLMMEQIKHLGPKAENWLLKFYNQCLAHKQIPRAWRKTKIIAILKPGKDASNARNYRPISLLCHLYKVYERMLLNRLGPVIEPKLIAQQAGFRPGKNCTGQILHLTEHIEEGYEKGCITGTVFVDLTAAYDTVQHRKMLHKVYHITRDFDFTKTVQTLLENRSFYVEFQGQKSRWRRQKNGLPQGSVLAPTLFNIFTNDQPQPPLTKSFIYADDLGLTTQAKDFETVEKQLTNALKDLSSYYKENHLKPNPAKTQVCAFHLRNREANRKLKVTWEGQELEHCFHPKYLGVTLDRTLTYRKHCMNTKHKVAARNNILRKLTGSAWGADPQVIRTSALALSFSTAEYACPVWHKSAHAKQVDKALNETCRIITGCLKPTPVDKLYKLAGIAPPDVRREVAANGERKKVEHCESHPLHGYHPPPTRLKSRKGFMRTTTPLDVPPAAARVSLWAAKPGNSNWMAPQEGLPPGANQEWATWKSLNRLRSGVGRSKDNLARWHYLEESSTLCDCGAEQTTQHMYACPQCPASCTEEELFKATDNAVAVARFWSKTI

SEQ ID NO: 128 - protein, 982 aa, synthetic construct
MDEYQRSLSRPLLTIMSINIEGLSLAKEELLAKMSEDISCDILCIQETHRDITMRRPKILGMQLAVERPHRQYGSAIFVRSGVAISATSLTEVNNIEILSVELDSCTVSSLYKPPGADFYFTPPTSCHNHEAHFVVGDFNSHSCVWGYDEDDRNGEAVLTWADNSRMSLLHDSKLPPSFNSGRWKRGYNPDLIFVKESISHQCTKRVLNPIPNTQHRPICCVAYAAVRPKSVPFRRRFNFNKANWTKFTETLEAAISDIEPSIENYDLFVEAVKRSSRLSIPRGCRTSYLPGLNEESLNQLQEYLRLFQENPYSDGTIAAGQKLSTALANAKKDRWIELLENLDMSKSSRKAWQLLRRLDSDPLVNPGHANVTPDQIAHQLIQNGKTNCSRIKMKINRVPELETHQLSSPLNLKELREAIKRCKTGKAPGLDDLMMEQIKHLGPKAENWLLKFYNQCLAHKQIPRAWRKTKIIAILKPGKDASNARNYRPISLLCHLYKVYERMLLNRLGPVIEPKLIAQQAGFRPGKNCTGQILHLTEHIEEGYEKGCITGTVFVDLTAAYDTVQHRKMLHKVYHITRDFDFTKTVQTLLENRSFYVEFQGQKSRWRRQKNGLPQGSVLAPTLFNIFTNDQPQPPLTKSFIYADDLGLTTQAKDFETVEKQLTNALKDLSSYYKENHLKPNPAKTQVCAFHLRNREANRKLKVTWEGQELEHCFHPKYLGVTLDRTLTYRKHCMNTKHKVAARNNILRKLTGSAWGADPQVIRTSALALSFSTAEYACPVWHKSAHAKQVDIALNRTCRIITGCLKPTPVDKLYKLAGIAPPDVRREVAANGERKKVEHCESHPLHGYHPPPTRLKSRKGFMRTTTPLDVPPAAARVSLWAAKPGNSNWMAPQEGLPPGANQEWATWKSLNRLRSGVGRSKDNLARWHYLEESSTLCDCGAEQTTQHMYACPQCPASCTEEELFKATDNAVAVARFWSKTI

SEQ ID NO: 129 - protein, 982 aa, synthetic construct
MDEYQRSLSRPLLTIMSINIEGLSLAKEELLAKMSEDISCDILCIQETHRDITMRRPKILGMQLAVERPHRQYGSAIFVRSGVAISATSLTEVNNIEILSVELDSCTVSSLYKPPGADFYFTPPTSCHNHEAHFVVGDFNSHSCVWGYDEDDRNGEAVLTWADNSRMSLLHDSKLPPSFNSGRWKRGYNPDLIFVKESISHQCTKRVLNPIPNTQHRPICCVAYAAVRPKSVPFRRRFNFNKANWTKFTETLEAAISDIEPSIENYDLFVEAVKRSSRLSIPRGCRTSYLPGLNEESLNQLQEYLRLFQENPYSDGTIAAGQKLSTALANAKKDRWIELLENLDMSKSSRKAWQLLRRLDSDPLVNPGHANVTPDQIAHQLIQNGKTNCSRIKMKINRVPELETHQLSSPLNLKELREAIKRCKTGKAPGLDDLMMEQIKHLGPKAENWLLKFYNQCLAHKQIPRAWRKTKIIAILKPGKDASNARNYRPISLLCHLYKVYERMLLNRLGPVIEPKLIAQQAGFRPGKNCTGQILHLTEHIEEGYEKGCITGTVFVDLTAAYDTVQHRKMLHKVYHITRDFDFTKTVQTLLENRSFYVEFQGQKSRWRRQKNGLPQGSVLAPTLFNIFTNDQPQPPLTKSFIYADDLGLTTQAKDFETVEKQLTNALKDLSSYYKENHLKPNPAKTQVCAFHLRNREANRKLKVTWEGQELEHCFHPKYLGVTLDRTLTYRKHCMNTKHKVAARNNILRKLTGSAWGADPQVIRTSALALSFSTAEYACPVWHKSAHAKQVMIALNETCRIITGCLKPTPVDKLYKLAGIAPPDVRREVAANGERKKVEHCESHPLHGYHPPPTRLKSRKGFMRTTTPLDVPPAAARVSLWAAKPGNSNWMAPQEGLPPGANQEWATWKSLNRLRSGVGRSKDNLARWHYLEESSTLCDCGAEQTTQHMYACPQCPASCTEEELFKATDNAVAVARFWSKTI

SEQ ID NO: 130 - protein, 982 aa, synthetic construct
MDEYQRSLSRPLLTIMSINIEGLSLAKEELLAKMSEDISCDILCIQETHRDITMRRPKILGMQLAVERPHRQYGSAIFVRSGVAISATSLTEVNNIEILSVELDSCTVSSLYKPPGADFYFTPPTSCHNHEAHFVVGDFNSHSCVWGYDEDDRNGEAVLTWADNSRMSLLHDSKLPPSFNSGRWKRGYNPDLIFVKESISHQCTKRVLNPIPNTQHRPICCVAYAAVRPKSVPFRRRFNFNKANWTKFTETLEAAISDIEPSIENYDLFVEAVKRSSRLSIPRGCRTSYLPGLNEESLNQLQEYLRLFQENPYSDGTIAAGQKLSTALANAKKDRWIELLENLDMSKSSRKAWQLLRRLDSDPLVNPGHANVTPDQIAHQLIQNGKTNCSRIKMKINRVPELETHQLSSPLNLKELREAIKRCKTGKAPGLDDLMMEQIKHLGPKAENWLLKFYNQCLAHKQIPRAWRKTKIIAILKPGKDASNARNYRPISLLCHLYKVYERMLLNRLGPVIEPKLIAQQAGFRPGKNCTGQILHLTEHIEEGYEKGCITGTVFVDLTAAYDTVQHRKMLHKVYHITRDFDFTKTVQTLLENRSFYVEFQGQKSRWRRQKNGLPQGSVLAPTLFNIFTNDQPQPPLTKSFIYADDLGLTTQAKDFETVEKQLTNALKDLSSYYKENHLKPNPAKTQVCAFHLRNREANRKLKVTWEGQELEHCFHPKYLGVTLDRTLTYRKHCMNTKHKVAARNNILRKLTGSAWGADPQVIRTSALALSFSTAEYACPVWHKSAHAKQVDIALNETCRIITGCLKRTPVDKLYKLAGIAPPDVRREVAANGERKKVEHCESHPLHGYHPPPTRLKSRKGFMRTTTPLDVPPAAARVSLWAAKPGNSNWMAPQEGLPPGANQEWATWKSLNRLRSGVGRSKDNLARWHYLEESSTLCDCGAEQTTQHMYACPQCPASCTEEELFKATDNAVAVARFWSKTI

SEQ ID NO: 131 - protein, 982 aa, synthetic construct
MDEYQRSLSRPLLTIMSINIEGLSLAKEELLAKMSEDISCDILCIQETHRDITMRRPKILGMQLAVERPHRQYGSAIFVRSGVAISATSLTEVNNIEILSVELDSCTVSSLYKPPGADFYFTPPTSCHNHEAHFVVGDFNSHSCVWGYDEDDRNGEAVLTWADNSRMSLLHDSKLPPSFNSGRWKRGYNPDLIFVKESISHQCTKRVLNPIPNTQHRPICCVAYAAVRPKSVPFRRRFNFNKANWTKFTETLEAAISDIEPSIENYDLFVEAVKRSSRLSIPRGCRTSYLPGLNEESLNQLQEYLRLFQENPYSDGTIAAGQKLSTALANAKKDRWIELLENLDMSKSSRKAWQLLRRLDSDPLVNPGHANVTPDQIAHQLIQNGKTNCSRIKMKINRVPELETHQLSSPLNLKELREAIKRCKTGKAPGLDDLMMEQIKHLGPKAENWLLKFYNQCLAHKQIPRAWRKTKIIAILKPGKDASNARNYRPISLLCHLYKVYERMLLNRLGPVIEPKLIAQQAGFRPGKNCTGQILHLTEHIEEGYEKGCITGTVFVDLTAAYDTVQHRKMLHKVYHITRDFDFTKTVQTLLENRSFYVEFQGQKSRWRRQKNGLPQGSVLAPTLFNIFTNDQPQPPLTKSFIYADDLGLTTQAKDFETVEKQLTNALKDLSSYYKENHLKPNPAKTQVCAFHLRNREANRKLKVTWEGQELEHCFHPKYLGVTLDRTLTYRKHCRNTKHKVAARNNILRKLTGSAWGADPQVIRTSALALSFSTAEYACPVWHKSAHAKQVDIALNETCRIITGCLKPTPVDKLYKLAGIAPPDVRREVAANGERKKVEHCESHPLHGYHPPPTRLKSRKGFMRTTTPLDVPPAAARVSLWAAKPGNSNWMAPQEGLPPGANQEWATWKSLNRLRSGVGRSKDNLARWHYLEESSTLCDCGAEQTTQHMYACPQCPASCTEEELFKATDNAVAVARFWSKTI

SEQ ID NO: 132 - protein, 982 aa, synthetic construct
MDEYQRSLSRPLLTIMSINIEGLSLAKEELLAKMSEDISCDILCIQETHRDITMRRPKILGMQLAVERPHRQYGSAIFVRSGVAISATSLTEVNNIEILSVELDSCTVSSLYKPPGADFYFTPPTSCHNHEAHFVVGDFNSHSCVWGYDEDDRNGEAVLTWADNSRMSLLHDSKLPPSFNSGRWKRGYNPDLIFVKESISHQCTKRVLNPIPNTQHRPICCVAYAAVRPKSVPFRRRFNFNKANWTKFTETLEAAISDIEPSIENYDLFVEAVKRSSRLSIPRGCRTSYLPGLNEESLNQLQEYLRLFQENPYSDGTIAAGQKLSTALANAKKDRWIELLENLDMSKSSRKAWQLLRRLDSDPLVNPGHANVTPDQIAHQLIQNGKTNCSRIKMKINRVPELETHQLSSPLNLKELREAIKRCKTGKAPGLDDLMMEQIKHLGPKAENWLLKFYNQCLAHKQIPRAWRKTKIIAILKPGKDASNARNYRPISLLCHLYKVYERMLLNRLGPVIEPKLIAQQAGFRPGKNCTGQILHLTEHIEEGYEKGCITGTVFVDLTAAYDTVQHRKMLHKVYHITRDFDFTKTVQTLLENRSFYVEFQGQKSRWRRQKNGLPQGSVLAPTLFNIFTNDQPQPPLTKSFIYADDLGLTTQAKDFETVEKQLTNALKDLSSYYKENHLKPNPAKTQVCAFHLRNREANRKLKVTWEGQELEHCFHPKYLGVTLDRTLTYRKHCMNTKHKVKARNNILRKLTGSAWGADPQVIRTSALALSFSTAEYACPVWHKSAHAKQVDIALNETCRIITGCLKPTPVDKLYKLAGIAPPDVRREVAANGERKKVEHCESHPLHGYHPPPTRLKSRKGFMRTTTPLDVPPAAARVSLWAAKPGNSNWMAPQEGLPPGANQEWATWKSLNRLRSGVGRSKDNLARWHYLEESSTLCDCGAEQTTQHMYACPQCPASCTEEELFKATDNAVAVARFWSKTI

SEQ ID NO: 133 - protein, 982 aa, synthetic construct
MDEYQRSLSRPLLTIMSINIEGLSLAKEELLAKMSEDISCDILCIQETHRDITMRRPKILGMQLAVERPHRQYGSAIFVRSGVAISATSLTEVNNIEILSVELDSCTVSSLYKPPGADFYFTPPTSCHNHEAHFVVGDFNSHSCVWGYDEDDRNGEAVLTWADNSRMSLLHDSKLPPSFNSGRWKRGYNPDLIFVKESISHQCTKRVLNPIPNTQHRPICCVAYAAVRPKSVPFRRRFNFNKANWTKFTETLEAAISDIEPSIENYDLFVEAVKRSSRLSIPRGCRTSYLPGLNEESLNQLQEYLRLFQENPYSDGTIAAGQKLSTALANAKKDRWIELLENLDMSKSSRKAWQLLRRLDSDPLVNPGHANVTPDQIAHQLIQNGKTNCSRIKMKINRVPELETHQLSSPLNLKELREAIKRCKTGKAPGLDDLMMEQIKHLGPKAENWLLKFYNQCLAHKQIPRAWRKTKIIAILKPGKDASNARNYRPISLLCHLYKVYERMLLNRLGPVIEPKLIAQQAGFRPGKNCTGQILHLTEHIEEGYEKGCITGTVFVDLTAAYDTVQHRKMLHKVYHITRDFDFTKTVQTLLENRSFYVEFQGQKSRWRRQKNGLPQGSVLAPTLFNIFTNDQPQPPLTKSFIYADDLGLTTQAKDFETVEKQLTNALKDLSSYYKENHLKPNPAKTQVCAFHKRNREANRKLKVTWEGQELEHCFHPKYLGVTLDRTLTYRKHCMNTKHKVAARNNILRKLTGSAWGADPQVIRTSALALSFSTAEYACPVWHKSAHAKQVDIALNETCRIITGCLKPTPVDKLYKLAGIAPPDVRREVAANGERKKVEHCESHPLHGYHPPPTRLKSRKGFMRTTTPLDVPPAAARVSLWAAKPGNSNWMAPQEGLPPGANQEWATWKSLNRLRSGVGRSKDNLARWHYLEESSTLCDCGAEQTTQHMYACPQCPASCTEEELFKATDNAVAVARFWSKTI

SEQ ID NO: 134 - protein, 982 aa, synthetic construct
MDEYQRSLSRPLLTIMSINIEGLSLAKEELLAKMSEDISCDILCIQETHRDITMRRPKILGMQLAVERPHRQYGSAIFVRSGVAISATSLTEVNNIEILSVELDSCTVSSLYKPPGADFYFTPPTSCHNHEAHFVVGDFNSHSCVWGYDEDDRNGEAVLTWADNSRMSLLHDSKLPPSFNSGRWKRGYNPDLIFVKESISHQCTKRVLNPIPNTQHRPICCVAYAAVRPKSVPFRRRFNFNKANWTKFTETLEAAISDIEPSIENYDLFVEAVKRSSRLSIPRGCRTSYLPGLNEESLNQLQEYLRLFQENPYSDGTIAAGQKLSTALANAKKDRWIELLENLDMSKSSRKAWQLLRRLDSDPLVNPGHANVTPDQIAHQLIQNGKTNCSRIKMKINRVPELETHQLSSPLNLKELREAIKRCKTGKAPGLDDLMMEQIKHLGPKAENWLLKFYNQCLAHKQIPRAWRKTKIIAILKPGKDASNARNYRPISLLCHLYKVYERMLLNRLGPVIEPKLIAQQAGFRPGKNCTGQILHLTEHIEEGYEKGCITGTVFVDLTAAYDTVQHRKMLHKVYHITRDFDFTKTVQTLLENRSFYVEFQGQKSRWRRQKNGLPQGSVLAPTLFNIFTNDQPQPPLTKSFIYADDLGLTTQAKDFETVEKQLTNALKDLSSYYKENHLKPNPAKTQVCAFHLRNREANRKLKVTWEGQELEHCFHPKYLGVTLDRTLTYRKHCMNTKHKVAARKNILRKLTGSAWGADPQVIRTSALALSFSTAEYACPVWHKSAHAKQVDIALNETCRIITGCLKPTPVDKLYKLAGIAPPDVRREVAANGERKKVEHCESHPLHGYHPPPTRLKSRKGFMRTTTPLDVPPAAARVSLWAAKPGNSNWMAPQEGLPPGANQEWATWKSLNRLRSGVGRSKDNLARWHYLEESSTLCDCGAEQTTQHMYACPQCPASCTEEELFKATDNAVAVARFWSKTI

SEQ ID NO: 135 - protein, 982 aa, synthetic construct
MDEYQRSLSRPLLTIMSINIEGLSLAKEELLAKMSEDISCDILCIQETHRDITMRRPKILGMQLAVERPHRQYGSAIFVRSGVAISATSLTEVNNIEILSVELDSCTVSSLYKPPGADFYFTPPTSCHNHEAHFVVGDFNSHSCVWGYDEDDRNGEAVLTWADNSRMSLLHDSKLPPSFNSGRWKRGYNPDLIFVKESISHQCTKRVLNPIPNTQHRPICCVAYAAVRPKSVPFRRRFNFNKANWTKFTETLEAAISDIEPSIENYDLFVEAVKRSSRLSIPRGCRTSYLPGLNEESLNQLQEYLRLFQENPYSDGTIAAGQKLSTALANAKKDRWIELLENLDMSKSSRKAWKLLRRLDSDPLVNPGHANVTPDQIAHQLIQNGKTNCSRIKMKINRVPELETHQLSSPLNLKELREAIKRCKTGKAPGLDDLMMEQIKHLGPKAENWLLKFYNQCLAHKQIPRAWRKTKIIAILKPGKDASNARNYRPISLLCHLYKVYERMLLNRLGPVIEPKLIAQQAGFRPGKNCTGQILHLTEHIEEGYEKGCITGTVFVDLTAAYDTVQHRKMLHKVYHITRDFDFTKTVQTLLENRSFYVEFQGQKSRWRRQKNGLPQGSVLAPTLFNIFTNDQPQPPLTKSFIYADDLGLTTQAKDFETVEKQLTNALKDLSSYYKENHLKPNPAKTQVCAFHLRNREANRKLKVTWEGQELEHCFHPKYLGVTLDRTLTYRKHCMNTKHKVAARNNILRKLTGSAWGADPQVIRTSALALSFSTAEYACPVWHKSAHAKQVDIALNETCRIITGCLKPTPVDKLYKLAGIAPPDVRREVAANGERKKVEHCESHPLHGYHPPPTRLKSRKGFMRTTTPLDVPPAAARVSLWAAKPGNSNWMAPQEGLPPGANQEWATWKSLNRLRSGVGRSKDNLARWHYLEESSTLCDCGAEQTTQHMYACPQCPASCTEEELFKATDNAVAVARFWSKTI

SEQ ID NO: 136 - protein, 982 aa, synthetic construct
MDEYQRSLSRPLLTIMSINIEGLSLAKEELLAKMSEDISCDILCIQETHRDITMRRPKILGMQLAVERPHRQYGSAIFVRSGVAISATSLTEVNNIEILSVELDSCTVSSLYKPPGADFYFTPPTSCHNHEAHFVVGDFNSHSCVWGYDEDDRNGEAVLTWADNSRMSLLHDSKLPPSFNSGRWKRGYNPDLIFVKESISHQCTKRVLNPIPNTQHRPICCVAYAAVRPKSVPFRRRFNFNKANWTKFTETLEAAISDIEPSIENYDLFVEAVKRSSRLSIPRGCRTSYLPGLNEESLNQLQEYLRLFQENPYSDGTIAAGQKLSTALANAKKDRWIELLENLDMSKSSRKAWQLLKRLDSDPLVNPGHANVTPDQIAHQLIQNGKTNCSRIKMKINRVPELETHQLSSPLNLKELREAIKRCKTGKAPGLDDLMMEQIKHLGPKAENWLLKFYNQCLAHKQIPRAWRKTKIIAILKPGKDASNARNYRPISLLCHLYKVYERMLLNRLGPVIEPKLIAQQAGFRPGKNCTGQILHLTEHIEEGYEKGCITGTVFVDLTAAYDTVQHRKMLHKVYHITRDFDFTKTVQTLLENRSFYVEFQGQKSRWRRQKNGLPQGSVLAPTLFNIFTNDQPQPPLTKSFIYADDLGLTTQAKDFETVEKQLTNALKDLSSYYKENHLKPNPAKTQVCAFHLRNREANRKLKVTWEGQELEHCFHPKYLGVTLDRTLTYRKHCMNTKHKVAARNNILRKLTGSAWGADPQVIRTSALALSFSTAEYACPVWHKSAHAKQVDIALNETCRIITGCLKPTPVDKLYKLAGIAPPDVRREVAANGERKKVEHCESHPLHGYHPPPTRLKSRKGFMRTTTPLDVPPAAARVSLWAAKPGNSNWMAPQEGLPPGANQEWATWKSLNRLRSGVGRSKDNLARWHYLEESSTLCDCGAEQTTQHMYACPQCPASCTEEELFKATDNAVAVARFWSKTI

SEQ ID NO: 137 - protein, 982 aa, synthetic construct
MDEYQRSLSRPLLTIMSINIEGLSLAKEELLAKMSEDISCDILCIQETHRDITMRRPKILGMQLAVERPHRQYGSAIFVRSGVAISATSLTEVNNIEILSVELDSCTVSSLYKPPGADFYFTPPTSCHNHEAHFVVGDFNSHSCVWGYDEDDRNGEAVLTWADNSRMSLLHDSKLPPSFNSGRWKRGYNPDLIFVKESISHQCTKRVLNPIPNTQHRPICCVAYAAVRPKSVPFRRRFNFNKANWTKFTETLEAAISDIEPSIENYDLFVEAVKRSSRLSIPRGCRTSYLPGLNEESLNQLQEYLRLFQENPYSDGTIAAGQKLSTALANAKKDRWIELLENLDMSKSSRKAWQLLRRLDSRPLVNPGHANVTPDQIAHQLIQNGKTNCSRIKMKINRVPELETHQLSSPLNLKELREAIKRCKTGKAPGLDDLMMEQIKHLGPKAENWLLKFYNQCLAHKQIPRAWRKTKIIAILKPGKDASNARNYRPISLLCHLYKVYERMLLNRLGPVIEPKLIAQQAGFRPGKNCTGQILHLTEHIEEGYEKGCITGTVFVDLTAAYDTVQHRKMLHKVYHITRDFDFTKTVQTLLENRSFYVEFQGQKSRWRRQKNGLPQGSVLAPTLFNIFTNDQPQPPLTKSFIYADDLGLTTQAKDFETVEKQLTNALKDLSSYYKENHLKPNPAKTQVCAFHLRNREANRKLKVTWEGQELEHCFHPKYLGVTLDRTLTYRKHCMNTKHKVAARNNILRKLTGSAWGADPQVIRTSALALSFSTAEYACPVWHKSAHAKQVDIALNETCRIITGCLKPTPVDKLYKLAGIAPPDVRREVAANGERKKVEHCESHPLHGYHPPPTRLKSRKGFMRTTTPLDVPPAAARVSLWAAKPGNSNWMAPQEGLPPGANQEWATWKSLNRLRSGVGRSKDNLARWHYLEESSTLCDCGAEQTTQHMYACPQCPASCTEEELFKATDNAVAVARFWSKTI

SEQ ID NO: 138 - protein, 982 aa, synthetic construct
MDEYQRSLSRPLLTIMSINIEGLSLAKEELLAKMSEDISCDILCIQETHRDITMRRPKILGMQLAVERPHRQYGSAIFVRSGVAISATSLTEVNNIEILSVELDSCTVSSLYKPPGADFYFTPPTSCHNHEAHFVVGDFNSHSCVWGYDEDDRNGEAVLTWADNSRMSLLHDSKLPPSFNSGRWKRGYNPDLIFVKESISHQCTKRVLNPIPNTQHRPICCVAYAAVRPKSVPFRRRFNFNKANWTKFTETLEAAISDIEPSIENYDLFVEAVKRSSRLSIPRGCRTSYLPGLNEESLNQLQEYLRLFQENPYSDGTIAAGQKLSTALANAKKDRWIELLENLDMSKSSRKAWQLLRRLDSDPLVNPGHANVTPDQIAHQLIQNGKTNCSRIKMKINRVPELETHQLSSPLELKELREAIKRCKTGKAPGLDDLMMEQIKHLGPKAENWLLKFYNQCLAHKQIPRAWRKTKIIAILKPGKDASNARNYRPISLLCHLYKVYERMLLNRLGPVIEPKLIAQQAGFRPGKNCTGQILHLTEHIEEGYEKGCITGTVFVDLTAAYDTVQHRKMLHKVYHITRDFDFTKTVQTLLENRSFYVEFQGQKSRWRRQKNGLPQGSVLAPTLFNIFTNDQPQPPLTKSFIYADDLGLTTQAKDFETVEKQLTNALKDLSSYYKENHLKPNPAKTQVCAFHLRNREANRKLKVTWEGQELEHCFHPKYLGVTLDRTLTYRKHCMNTKHKVAARNNILRKLTGSAWGADPQVIRTSALALSFSTAEYACPVWHKSAHAKQVDIALNETCRIITGCLKPTPVDKLYKLAGIAPPDVRREVAANGERKKVEHCESHPLHGYHPPPTRLKSRKGFMRTTTPLDVPPAAARVSLWAAKPGNSNWMAPQEGLPPGANQEWATWKSLNRLRSGVGRSKDNLARWHYLEESSTLCDCGAEQTTQHMYACPQCPASCTEEELFKATDNAVAVARFWSKTI

SEQ ID NO: 139 - protein, 982 aa, synthetic construct
MDEYQRSLSRPLLTIMSINIEGLSLAKEELLAKMSEDISCDILCIQETHRDITMRRPKILGMQLAVERPHRQYGSAIFVRSGVAISATSLTEVNNIEILSVELDSCTVSSLYKPPGADFYFTPPTSCHNHEAHFVVGDFNSHSCVWGYDEDDRNGEAVLTWADNSRMSLLHDSKLPPSFNSGRWKRGYNPDLIFVKESISHQCTKRVLNPIPNTQHRPICCVAYAAVRPKSVPFRRRFNFNKANWTKFTETLEAAISDIEPSIENYDLFVEAVKRSSRLSIPRGCRTSYLPGLNEESLNQLQEYLRLFQENPYSDGTIAAGQKLSTALANAKKDRWIELLENLDMSKSSRKAWQLLRRLDSDPLVNPGHANVTPDQIAHQLIQNGKTNCSRIKMKINRVPELETHQLSSPLNLKELREAIKRCRTGKAPGLDDLMMEQIKHLGPKAENWLLKFYNQCLAHKQIPRAWRKTKIIAILKPGKDASNARNYRPISLLCHLYKVYERMLLNRLGPVIEPKLIAQQAGFRPGKNCTGQILHLTEHIEEGYEKGCITGTVFVDLTAAYDTVQHRKMLHKVYHITRDFDFTKTVQTLLENRSFYVEFQGQKSRWRRQKNGLPQGSVLAPTLFNIFTNDQPQPPLTKSFIYADDLGLTTQAKDFETVEKQLTNALKDLSSYYKENHLKPNPAKTQVCAFHLRNREANRKLKVTWEGQELEHCFHPKYLGVTLDRTLTYRKHCMNTKHKVAARNNILRKLTGSAWGADPQVIRTSALALSFSTAEYACPVWHKSAHAKQVDIALNETCRIITGCLKPTPVDKLYKLAGIAPPDVRREVAANGERKKVEHCESHPLHGYHPPPTRLKSRKGFMRTTTPLDVPPAAARVSLWAAKPGNSNWMAPQEGLPPGANQEWATWKSLNRLRSGVGRSKDNLARWHYLEESSTLCDCGAEQTTQHMYACPQCPASCTEEELFKATDNAVAVARFWSKTI

SEQ ID NO: 140 - protein, 982 aa, synthetic construct
MDEYQRSLSRPLLTIMSINIEGLSLAKEELLAKMSEDISCDILCIQETHRDITMRRPKILGMQLAVERPHRQYGSAIFVRSGVAISATSLTEVNNIEILSVELDSCTVSSLYKPPGADFYFTPPTSCHNHEAHFVVGDFNSHSCVWGYDEDDRNGEAVLTWADNSRMSLLHDSKLPPSFNSGRWKRGYNPDLIFVKESISHQCTKRVLNPIPNTQHRPICCVAYAAVRPKSVPFRRRFNFNKANWTKFTETLEAAISDIEPSIENYDLFVEAVKRSSRLSIPRGCRTSYLPGLNEESLNQLQEYLRLFQENPYSDGTIAAGQKLSTALANAKKDRWIELLENLDMSKSSRKAWQLLRRLDSDPLVNPGHANVTPDQIAHQLIQNGKTNCSRIKMKINRVPELETHQLSSPLNLKELREAIKRCKTGKAPGLDDLYMEQIKHLGPKAENWLLKFYNQCLAHKQIPRAWRKTKIIAILKPGKDASNARNYRPISLLCHLYKVYERMLLNRLGPVIEPKLIAQQAGFRPGKNCTGQILHLTEHIEEGYEKGCITGTVFVDLTAAYDTVQHRKMLHKVYHITRDFDFTKTVQTLLENRSFYVEFQGQKSRWRRQKNGLPQGSVLAPTLFNIFTNDQPQPPLTKSFIYADDLGLTTQAKDFETVEKQLTNALKDLSSYYKENHLKPNPAKTQVCAFHLRNREANRKLKVTWEGQELEHCFHPKYLGVTLDRTLTYRKHCMNTKHKVAARNNILRKLTGSAWGADPQVIRTSALALSFSTAEYACPVWHKSAHAKQVDIALNETCRIITGCLKPTPVDKLYKLAGIAPPDVRREVAANGERKKVEHCESHPLHGYHPPPTRLKSRKGFMRTTTPLDVPPAAARVSLWAAKPGNSNWMAPQEGLPPGANQEWATWKSLNRLRSGVGRSKDNLARWHYLEESSTLCDCGAEQTTQHMYACPQCPASCTEEELFKATDNAVAVARFWSKTI

SEQ ID NO: 141 - protein, 982 aa, synthetic construct
MDEYQRSLSRPLLTIMSINIEGLSLAKEELLAKMSEDISCDILCIQETHRDITMRRPKILGMQLAVERPHRQYGSAIFVRSGVAISATSLTEVNNIEILSVELDSCTVSSLYKPPGADFYFTPPTSCHNHEAHFVVGDFNSHSCVWGYDEDDRNGEAVLTWADNSRMSLLHDSKLPPSFNSGRWKRGYNPDLIFVKESISHQCTKRVLNPIPNTQHRPICCVAYAAVRPKSVPFRRRFNFNKANWTKFTETLEAAISDIEPSIENYDLFVEAVKRSSRLSIPRGCRTSYLPGLNEESLNQLQEYLRLFQENPYSDGTIAAGQKLSTALANAKKDRWIELLENLDMSKSSRKAWQLLRRLDSDPLVNPGHANVTPDQIAHQLIQNGKTNCSRIKMKINRVPELETHQLSSPLNLKELREAIKRCKTGKAPGLDDLMMEQIKHLGPKAQNWLLKFYNQCLAHKQIPRAWRKTKIIAILKPGKDASNARNYRPISLLCHLYKVYERMLLNRLGPVIEPKLIAQQAGFRPGKNCTGQILHLTEHIEEGYEKGCITGTVFVDLTAAYDTVQHRKMLHKVYHITRDFDFTKTVQTLLENRSFYVEFQGQKSRWRRQKNGLPQGSVLAPTLFNIFTNDQPQPPLTKSFIYADDLGLTTQAKDFETVEKQLTNALKDLSSYYKENHLKPNPAKTQVCAFHLRNREANRKLKVTWEGQELEHCFHPKYLGVTLDRTLTYRKHCMNTKHKVAARNNILRKLTGSAWGADPQVIRTSALALSFSTAEYACPVWHKSAHAKQVDIALNETCRIITGCLKPTPVDKLYKLAGIAPPDVRREVAANGERKKVEHCESHPLHGYHPPPTRLKSRKGFMRTTTPLDVPPAAARVSLWAAKPGNSNWMAPQEGLPPGANQEWATWKSLNRLRSGVGRSKDNLARWHYLEESSTLCDCGAEQTTQHMYACPQCPASCTEEELFKATDNAVAVARFWSKTI

SEQ ID NO: 142 - protein, 982 aa, synthetic construct
MDEYQRSLSRPLLTIMSINIEGLSLAKEELLAKMSEDISCDILCIQETHRDITMRRPKILGMQLAVERPHRQYGSAIFVRSGVAISATSLTEVNNIEILSVELDSCTVSSLYKPPGADFYFTPPTSCHNHEAHFVVGDFNSHSCVWGYDEDDRNGEAVLTWADNSRMSLLHDSKLPPSFNSGRWKRGYNPDLIFVKESISHQCTKRVLNPIPNTQHRPICCVAYAAVRPKSVPFRRRFNFNKANWTKFTETLEAAISDIEPSIENYDLFVEAVKRSSRLSIPRGCRTSYLPGLNEESLNQLQEYLRLFQENPYSDGTIAAGQKLSTALANAKKDRWIELLENLDMSKSSRKAWQLLRRLDSDPLVNPGHANVTPDQIAHQLIQNGKTNCSRIKMKINRVPELETHQLSSPLNLKELREAIKRCKTGKAPGLDDLMMEQIKHLGPKAENWLLKFYNQCLAHKQIPRAWRKTKIIAILKPGKDASNAKNYRPISLLCHLYKVYERMLLNRLGPVIEPKLIAQQAGFRPGKNCTGQILHLTEHIEEGYEKGCITGTVFVDLTAAYDTVQHRKMLHKVYHITRDFDFTKTVQTLLENRSFYVEFQGQKSRWRRQKNGLPQGSVLAPTLFNIFTNDQPQPPLTKSFIYADDLGLTTQAKDFETVEKQLTNALKDLSSYYKENHLKPNPAKTQVCAFHLRNREANRKLKVTWEGQELEHCFHPKYLGVTLDRTLTYRKHCMNTKHKVAARNNILRKLTGSAWGADPQVIRTSALALSFSTAEYACPVWHKSAHAKQVDIALNETCRIITGCLKPTPVDKLYKLAGIAPPDVRREVAANGERKKVEHCESHPLHGYHPPPTRLKSRKGFMRTTTPLDVPPAAARVSLWAAKPGNSNWMAPQEGLPPGANQEWATWKSLNRLRSGVGRSKDNLARWHYLEESSTLCDCGAEQTTQHMYACPQCPASCTEEELFKATDNAVAVARFWSKTI

SEQ ID NO: 143 - protein, 982 aa, synthetic construct
MDEYQRSLSRPLLTIMSINIEGLSLAKEELLAKMSEDISCDILCIQETHRDITMRRPKILGMQLAVERPHRQYGSAIFVRSGVAISATSLTEVNNIEILSVELDSCTVSSLYKPPGADFYFTPPTSCHNHEAHFVVGDFNSHSCVWGYDEDDRNGEAVLTWADNSRMSLLHDSKLPPSFNSGRWKRGYNPDLIFVKESISHQCTKRVLNPIPNTQHRPICCVAYAAVRPKSVPFRRRFNFNKANWTKFTETLEAAISDIEPSIENYDLFVEAVKRSSRLSIPRGCRTSYLPGLNEESLNQLQEYLRLFQENPYSDGTIAAGQKLSTALANAKKDRWIELLENLDMSKSSRKAWQLLRRLDSDPLVNPGHANVTPDQIAHQLIQNGKTNCSRIKMKINRVPELETHQLSSPLNLKELREAIKRCKTGKAPGLDDLMMEQIKHLGPKAENWLLKFYNQCLAHKQIPRAWRKTKIIAILKPGKDASNARNYRPISLLCHLYKVYERMLLNRLGSVIEPKLIAQQAGFRPGKNCTGQILHLTEHIEEGYEKGCITGTVFVDLTAAYDTVQHRKMLHKVYHITRDFDFTKTVQTLLENRSFYVEFQGQKSRWRRQKNGLPQGSVLAPTLFNIFTNDQPQPPLTKSFIYADDLGLTTQAKDFETVEKQLTNALKDLSSYYKENHLKPNPAKTQVCAFHLRNREANRKLKVTWEGQELEHCFHPKYLGVTLDRTLTYRKHCMNTKHKVAARNNILRKLTGSAWGADPQVIRTSALALSFSTAEYACPVWHKSAHAKQVDIALNETCRIITGCLKPTPVDKLYKLAGIAPPDVRREVAANGERKKVEHCESHPLHGYHPPPTRLKSRKGFMRTTTPLDVPPAAARVSLWAAKPGNSNWMAPQEGLPPGANQEWATWKSLNRLRSGVGRSKDNLARWHYLEESSTLCDCGAEQTTQHMYACPQCPASCTEEELFKATDNAVAVARFWSKTI

SEQ ID NO: 144 - protein, 982 aa, synthetic construct
MDEYQRSLSRPLLTIMSINIEGLSLAKEELLAKMSEDISCDILCIQETHRDITMRRPKILGMQLAVERPHRQYGSAIFVRSGVAISATSLTEVNNIEILSVELDSCTVSSLYKPPGADFYFTPPTSCHNHEAHFVVGDFNSHSCVWGYDEDDRNGEAVLTWADNSRMSLLHDSKLPPSFNSGRWKRGYNPDLIFVKESISHQCTKRVLNPIPNTQHRPICCVAYAAVRPKSVPFRRRFNFNKANWTKFTETLEAAISDIEPSIENYDLFVEAVKRSSRLSIPRGCRTSYLPGLNEESLNQLQEYLRLFQENPYSDGTIAAGQKLSTALANAKKDRWIELLENLDMSKSSRKAWQLLRRLDSDPLVNPGHANVTPDQIAHQLIQNGKTNCSRIKMKINRVPELETHQLSSPLNLKELREAIKRCKTGKAPGLDDLMMEQIKHLGPKAENWLLKFYNQCLAHKQIPRAWRKTKIIAILKPGKDASNARNYRPISLLCHLYKVYERMLLNRLGPVIEEKLIAQQAGFRPGKNCTGQILHLTEHIEEGYEKGCITGTVFVDLTAAYDTVQHRKMLHKVYHITRDFDFTKTVQTLLENRSFYVEFQGQKSRWRRQKNGLPQGSVLAPTLFNIFTNDQPQPPLTKSFIYADDLGLTTQAKDFETVEKQLTNALKDLSSYYKENHLKPNPAKTQVCAFHLRNREANRKLKVTWEGQELEHCFHPKYLGVTLDRTLTYRKHCMNTKHKVAARNNILRKLTGSAWGADPQVIRTSALALSFSTAEYACPVWHKSAHAKQVDIALNETCRIITGCLKPTPVDKLYKLAGIAPPDVRREVAANGERKKVEHCESHPLHGYHPPPTRLKSRKGFMRTTTPLDVPPAAARVSLWAAKPGNSNWMAPQEGLPPGANQEWATWKSLNRLRSGVGRSKDNLARWHYLEESSTLCDCGAEQTTQHMYACPQCPASCTEEELFKATDNAVAVARFWSKTI

SEQ ID NO: 145 - protein, 982 aa, synthetic construct
MDEYQRSLSRPLLTIMSINIEGLSLAKEELLAKMSEDISCDILCIQETHRDITMRRPKILGMQLAVERPHRQYGSAIFVRSGVAISATSLTEVNNIEILSVELDSCTVSSLYKPPGADFYFTPPTSCHNHEAHFVVGDFNSHSCVWGYDEDDRNGEAVLTWADNSRMSLLHDSKLPPSFNSGRWKRGYNPDLIFVKESISHQCTKRVLNPIPNTQHRPICCVAYAAVRPKSVPFRRRFNFNKANWTKFTETLEAAISDIEPSIENYDLFVEAVKRSSRLSIPRGCRTSYLPGLNEESLNQLQEYLRLFQENPYSDGTIAAGQKLSTALANAKKDRWIELLENLDMSKSSRKAWQLLRRLDSDPLVNPGHANVTPDQIAHQLIQNGKTNCSRIKMKINRVPELETHQLSSPLNLKELREAIKRCKTGKAPGLDDLMMEQIKHLGPKAENWLLKFYNQCLAHKQIPRAWRKTKIIAILKPGKDASNARNYRPISLLCHLYKVYERMLLNRLGPVIEPKLIAQQAGFRPGKNCTGQILHLTEHIEEGYEKGCITGTVFVDLTAAYDTVQHKKMLHKVYHITRDFDFTKTVQTLLENRSFYVEFQGQKSRWRRQKNGLPQGSVLAPTLFNIFTNDQPQPPLTKSFIYADDLGLTTQAKDFETVEKQLTNALKDLSSYYKENHLKPNPAKTQVCAFHLRNREANRKLKVTWEGQELEHCFHPKYLGVTLDRTLTYRKHCMNTKHKVAARNNILRKLTGSAWGADPQVIRTSALALSFSTAEYACPVWHKSAHAKQVDIALNETCRIITGCLKPTPVDKLYKLAGIAPPDVRREVAANGERKKVEHCESHPLHGYHPPPTRLKSRKGFMRTTTPLDVPPAAARVSLWAAKPGNSNWMAPQEGLPPGANQEWATWKSLNRLRSGVGRSKDNLARWHYLEESSTLCDCGAEQTTQHMYACPQCPASCTEEELFKATDNAVAVARFWSKTI

SEQ ID NO: 146 - protein, 982 aa, synthetic construct
MDEYQRSLSRPLLTIMSINIEGLSLAKEELLAKMSEDISCDILCIQETHRDITMRRPKILGMQLAVERPHRQYGSAIFVRSGVAISATSLTEVNNIEILSVELDSCTVSSLYKPPGADFYFTPPTSCHNHEAHFVVGDFNSHSCVWGYDEDDRNGEAVLTWADNSRMSLLHDSKLPPSFNSGRWKRGYNPDLIFVKESISHQCTKRVLNPIPNTQHRPICCVAYAAVRPKSVPFRRRFNFNKANWTKFTETLEAAISDIEPSIENYDLFVEAVKRSSRLSIPRGCRTSYLPGLNEESLNQLQEYLRLFQENPYSDGTIAAGQKLSTALANAKKDRWIELLENLDMSKSSRKAWQLLRRLDSDPLVNPGHANVTPDQIAHQLIQNGKTNCSRIKMKINRVPELETHQLSSPLNLKELREAIKRCKTGKAPGLDDLMMEQIKHLGPKAENWLLKFYNQCLAHKQIPRAWRKTKIIAILKPGKDASNARNYRPISLLCHLYKVYERMLLNRLGPVIEPKLIAQQAGFRPGKNCTGQILHLTEHIEEGYEKGCITGTVFVDLTAAYDTVQHRKMLHKVYKITRDFDFTKTVQTLLENRSFYVEFQGQKSRWRRQKNGLPQGSVLAPTLFNIFTNDQPQPPLTKSFIYADDLGLTTQAKDFETVEKQLTNALKDLSSYYKENHLKPNPAKTQVCAFHLRNREANRKLKVTWEGQELEHCFHPKYLGVTLDRTLTYRKHCMNTKHKVAARNNILRKLTGSAWGADPQVIRTSALALSFSTAEYACPVWHKSAHAKQVDIALNETCRIITGCLKPTPVDKLYKLAGIAPPDVRREVAANGERKKVEHCESHPLHGYHPPPTRLKSRKGFMRTTTPLDVPPAAARVSLWAAKPGNSNWMAPQEGLPPGANQEWATWKSLNRLRSGVGRSKDNLARWHYLEESSTLCDCGAEQTTQHMYACPQCPASCTEEELFKATDNAVAVARFWSKTI

SEQ ID NO: 147 - protein, 982 aa, synthetic construct
MDEYQRSLSRPLLTIMSINIEGLSLAKEELLAKMSEDISCDILCIQETHRDITMRRPKILGMQLAVERPHRQYGSAIFVRSGVAISATSLTEVNNIEILSVELDSCTVSSLYKPPGADFYFTPPTSCHNHEAHFVVGDFNSHSCVWGYDEDDRNGEAVLTWADNSRMSLLHDSKLPPSFNSGRWKRGYNPDLIFVKESISHQCTKRVLNPIPNTQHRPICCVAYAAVRPKSVPFRRRFNFNKANWTKFTETLEAAISDIEPSIENYDLFVEAVKRSSRLSIPRGCRTSYLPGLNEESLNQLQEYLRLFQENPYSDGTIAAGQKLSTALANAKKDRWIELLENLDMSKSSRKAWQLLRRLDSDPLVNPGHANVTPDQIAHQLIQNGKTNCSRIKMKINRVPELETHQLSSPLNLKELREAIKRCKTGKAPGLDDLMMEQIKHLGPKAENWLLKFYNQCLAHKQIPRAWRKTKIIAILKPGKDASNARNYRPISLLCHLYKVYERMLLNRLGPVIEPKLIAQQAGFRPGKNCTGQILHLTEHIEEGYEKGCITGTVFVDLTAAYDTVQHRKMLHKVYHITRDFDFTKTVQTLLENRRFYVEFQGQKSRWRRQKNGLPQGSVLAPTLFNIFTNDQPQPPLTKSFIYADDLGLTTQAKDFETVEKQLTNALKDLSSYYKENHLKPNPAKTQVCAFHLRNREANRKLKVTWEGQELEHCFHPKYLGVTLDRTLTYRKHCMNTKHKVAARNNILRKLTGSAWGADPQVIRTSALALSFSTAEYACPVWHKSAHAKQVDIALNETCRIITGCLKPTPVDKLYKLAGIAPPDVRREVAANGERKKVEHCESHPLHGYHPPPTRLKSRKGFMRTTTPLDVPPAAARVSLWAAKPGNSNWMAPQEGLPPGANQEWATWKSLNRLRSGVGRSKDNLARWHYLEESSTLCDCGAEQTTQHMYACPQCPASCTEEELFKATDNAVAVARFWSKTI

SEQ ID NO: 148 - protein, 982 aa, synthetic construct
MDEYQRSLSRPLLTIMSINIEGLSLAKEELLAKMSEDISCDILCIQETHRDITMRRPKILGMQLAVERPHRQYGSAIFVRSGVAISATSLTEVNNIEILSVELDSCTVSSLYKPPGADFYFTPPTSCHNHEAHFVVGDFNSHSCVWGYDEDDRNGEAVLTWADNSRMSLLHDSKLPPSFNSGRWKRGYNPDLIFVKESISHQCTKRVLNPIPNTQHRPICCVAYAAVRPKSVPFRRRFNFNKANWTKFTETLEAAISDIEPSIENYDLFVEAVKRSSRLSIPRGCRTSYLPGLNEESLNQLQEYLRLFQENPYSDGTIAAGQKLSTALANAKKDRWIELLENLDMSKSSRKAWQLLRRLDSDPLVNPGHANVTPDQIAHQLIQNGKTNCSRIKMKINRVPELETHQLSSPLNLKELREAIKRCKTGKAPGLDDLMMEQIKHLGPKAENWLLKFYNQCLAHKQIPRAWRKTKIIAILKPGKDASNARNYRPISLLCHLYKVYERMLLNRLGPVIEPKLIAQQAGFRPGKNCTGQILHLTEHIEEGYEKGCITGTVFVDLTAAYDTVQHRKMLHKVYHITRDFDFTKTVQTLLENRSFYVEFQGQKSRWRRQKNGLPQGSVLAPTLFNIFTNDQPQPPLTKSFIYADDLGLTTQAKDFETVEKQLTNALKDLSSYYKRNHLKPNPAKTQVCAFHLRNREANRKLKVTWEGQELEHCFHPKYLGVTLDRTLTYRKHCMNTKHKVAARNNILRKLTGSAWGADPQVIRTSALALSFSTAEYACPVWHKSAHAKQVDIALNETCRIITGCLKPTPVDKLYKLAGIAPPDVRREVAANGERKKVEHCESHPLHGYHPPPTRLKSRKGFMRTTTPLDVPPAAARVSLWAAKPGNSNWMAPQEGLPPGANQEWATWKSLNRLRSGVGRSKDNLARWHYLEESSTLCDCGAEQTTQHMYACPQCPASCTEEELFKATDNAVAVARFWSKTI

SEQ ID NO: 149 - protein, 982 aa, synthetic construct
MDEYQRSLSRPLLTIMSINIEGLSLAKEELLAKMSEDISCDILCIQETHRDITMRRPKILGMQLAVERPHRQYGSAIFVRSGVAISATSLTEVNNIEILSVELDSCTVSSLYKPPGADFYFTPPTSCHNHEAHFVVGDFNSHSCVWGYDEDDRNGEAVLTWADNSRMSLLHDSKLPPSFNSGRWKRGYNPDLIFVKESISHQCTKRVLNPIPNTQHRPICCVAYAAVRPKSVPFRRRFNFNKANWTKFTETLEAAISDIEPSIENYDLFVEAVKRSSRLSIPRGCRTSYLPGLNEESLNQLQEYLRLFQENPYSDGTIAAGQKLSTALANAKKDRWIELLENLDMSKSSRKAWQLLRRLDSDPLVNPGHANVTPDQIAHQLIQNGKTNCSRIKMKINRVPELETHQLSSPLNLKELREAIKRCKTGKAPGLDDLMMEQIKHLGPKAENWLLKFYNQCLAHKQIPRAWRKTKIIAILKPGKDASNARNYRPISLLCHLYKVYERMLLNRLGPVIEPKLIAQQAGFRPGKNCTGQILHLTEHIEEGYEKGCITGTVFVDLTAAYDTVQHRKMLHKVYHITRDFDFTKTVQTLLENRSFYVEFQGQKSRWRRQKNGLPQGSVLAPTLFNIFTNDQPQPPLTKSFIYADDLGLTTQAKDFETVEKQLTNALKDLSSYYKENHLKPNPEKTQVCAFHLRNREANRKLKVTWEGQELEHCFHPKYLGVTLDRTLTYRKHCMNTKHKVAARNNILRKLTGSAWGADPQVIRTSALALSFSTAEYACPVWHKSAHAKQVDIALNETCRIITGCLKPTPVDKLYKLAGIAPPDVRREVAANGERKKVEHCESHPLHGYHPPPTRLKSRKGFMRTTTPLDVPPAAARVSLWAAKPGNSNWMAPQEGLPPGANQEWATWKSLNRLRSGVGRSKDNLARWHYLEESSTLCDCGAEQTTQHMYACPQCPASCTEEELFKATDNAVAVARFWSKTI

SEQ ID NO: 150 - protein, 982 aa, synthetic construct
MDEYQRSLSRPLLTIMSINIEGLSLAKEELLAKMSEDISCDILCIQETHRDITMRRPKILGMQLAVERPHRQYGSAIFVRSGVAISATSLTEVNNIEILSVELDSCTVSSLYKPPGADFYFTPPTSCHNHEAHFVVGDFNSHSCVWGYDEDDRNGEAVLTWADNSRMSLLHDSKLPPSFNSGRWKRGYNPDLIFVKESISHQCTKRVLNPIPNTQHRPICCVAYAAVRPKSVPFRRRFNFNKANWTKFTETLEAAISDIEPSIENYDLFVEAVKRSSRLSIPRGCRTSYLPGLNEESLNQLQEYLRLFQENPYSDGTIAAGQKLSTALANAKKDRWIELLENLDMSKSSRKAWQLLRRLDSDPLVNPGHANVTPDQIAHQLIQNGKTNCSRIKMKINRVPELETHQLSSPLNLKELREAIKRCKTGKAPGLDDLMMEQIKHLGPKAENWLLKFYNQCLAHKQIPRAWRKTKIIAILKPGKDASNARNYRPISLLCHLYKVYERMLLNRLGPVIEPKLIAQQAGFRPGKNCTGQILHLTEHIEEGYEKGCITGTVFVDLTAAYDTVQHRKMLHKVYHITRDFDFTKTVQTLLENRSFYVEFQGQKSRWRRQKNGLPQGSVLAPTLFNIFTNDQPQPPLTKSFIYADDLGLTTQAKDFETVEKQLTNALKDLSSYYKENHLKPNPAKTQVCAFHLRNREANRKLKVTWEGQELEHCFHPKYLGVTLDRTLTYRKHCMNTKHKVAARNNILRKLTGSAWGADPQVIRTSALALSFSTAEYACPVWHKSAHAKQVDIALNETCRIITGCLKPTPVDKLYKLAGIAPPDVRREVAANGERKKVEHCESHPLHGYHPPPTRLKSRKGFMRTTTPLDVPPEAARVSLWAAKPGNSNWMAPQEGLPPGANQEWATWKSLNRLRSGVGRSKDNLARWHYLEESSTLCDCGAEQTTQHMYACPQCPASCTEEELFKATDNAVAVARFWSKTI

SEQ ID NO: 151 - protein, 982 aa, synthetic construct
MDEYQRSLSRPLLTIMSINIEGLSLAKEELLAKMSEDISCDILCIQETHRDITMRRPKILGMQLAVERPHRQYGSAIFVRSGVAISATSLTEVNNIEILSVELDSCTVSSLYKPPGADFYFTPPTSCHNHEAHFVVGDFNSHSCVWGYDEDDRNGEAVLTWADNSRMSLLHDSKLPPSFNSGRWKRGYNPDLIFVKESISHQCTKRVLNPIPNTQHRPICCVAYAAVRPKSVPFRRRFNFNKANWTKFTETLEAAISDIEPSIENYDLFVEAVKRSSRLSIPRGCRTSYLPGLNEESLNQLQEYLRLFQENPYSDGTIAAGQKLSTALANAKKDRWIELLENLDMSKSSRKAWQLLRRLDSDPLVNPGHANVTPDQIAHQLIQNGKTNCSRIKMKINRVPELETHQLSSPLNLKELREAIKRCKTGKAPGLDDLMMEQIKHLGPKAENWLLKFYNQCLAHKQIPRAWRKTKIIAILKPGKDASNARNYRPISLLCHLYKVYERMLLNRLGPVIEPKLIAQQAGFRPGKNCTGQILHLTEHIEEGYEKGCITGTVFVDLTAAYDTVQHRKLLHKVYHITRDFDFTKTVQTLLENRSFYVEFQGQKSRWRRQKNGLPQGSVLAPTLFNIFTNDQPQPPLTKSFIYADDLGLTTQAKDFETVEKQLTNALKDLSSYYKENHLKPNPAKTQVCAFHLRNREANRKLKVTWEGQELEHCFHPKYLGVTLDRTLTYRKHCMNTKHKVAARNNILRKLTGSAWGADPQVIRTSALALSFSTAEYACPVWHKSAHAKQVDIALNETCRIITGCLKPTPVDKLYKLAGIAPPDVRREVAANGERKKVEHCESHPLHGYHPPPTRLKSRKGFMRTTTPLDVPPAAARVSLWAAKPGNSNWMAPQEGLPPGANQEWATWKSLNRLRSGVGRSKDNLARWHYLEESSTLCDCGAEQTTQHMYACPQCPASCTEEELFKATDNAVAVARFWSKTI

SEQ ID NO: 152 - protein, 982 aa, synthetic construct
MDEYQRSLSRPLLTIMSINIEGLSLAKEELLAKMSEDISCDILCIQETHRDITMRRPKILGMQLAVERPHRQYGSAIFVRSGVAISATSLTEVNNIEILSVELDSCTVSSLYKPPGADFYFTPPTSCHNHEAHFVVGDFNSHSCVWGYDEDDRNGEAVLTWADNSRMSLLHDSKLPPSFNSGRWKRGYNPDLIFVKESISHQCTKRVLNPIPNTQHRPICCVAYAAVRPKSVPFRRRFNFNKANWTKFTETLEAAISDIEPSIENYDLFVEAVKRSSRLSIPRGCRTSYLPGLNEESLNQLQEYLRLFQENPYSDGTIAAGQKLSTALANAKKDRWIELLENLDMSKSSRKAWQLLRRLDSDPLVNPGHANVTPDQIAHQLIQNGKTNCSRIKMKINRVPELETHQLSSPLNLKELREAIKRCKTGKAPGLDDLMMEQIKHLGPKAENWLLKFYNQCLAHKQIPRAWRKTKIIAILKPGKDASNARNYRPISLLCHLYKVYERMLLNRLGPVIEPKLIAQQAGFRPGKNCTGQILHLTEHIEEGYEKGCITGTVFVDLTAAYDTVQHRKMLHKLYHITRDFDFTKTVQTLLENRSFYVEFQGQKSRWRRQKNGLPQGSVLAPTLFNIFTNDQPQPPLTKSFIYADDLGLTTQAKDFETVEKQLTNALKDLSSYYKENHLKPNPAKTQVCAFHLRNREANRKLKVTWEGQELEHCFHPKYLGVTLDRTLTYRKHCMNTKHKVAARNNILRKLTGSAWGADPQVIRTSALALSFSTAEYACPVWHKSAHAKQVDIALNETCRIITGCLKPTPVDKLYKLAGIAPPDVRREVAANGERKKVEHCESHPLHGYHPPPTRLKSRKGFMRTTTPLDVPPAAARVSLWAAKPGNSNWMAPQEGLPPGANQEWATWKSLNRLRSGVGRSKDNLARWHYLEESSTLCDCGAEQTTQHMYACPQCPASCTEEELFKATDNAVAVARFWSKTI

SEQ ID NO: 153 - protein, 982 aa, synthetic construct
MDEYQRSLSRPLLTIMSINIEGLSLAKEELLAKMSEDISCDILCIQETHRDITMRRPKILGMQLAVERPHRQYGSAIFVRSGVAISATSLTEVNNIEILSVELDSCTVSSLYKPPGADFYFTPPTSCHNHEAHFVVGDFNSHSCVWGYDEDDRNGEAVLTWADNSRMSLLHDSKLPPSFNSGRWKRGYNPDLIFVKESISHQCTKRVLNPIPNTQHRPICCVAYAAVRPKSVPFRRRFNFNKANWTKFTETLEAAISDIEPSIENYDLFVEAVKRSSRLSIPRGCRTSYLPGLNEESLNQLQEYLRLFQENPYSDGTIAAGQKLSTALANAKKDRWIELLENLDMSKSSRKAWQLLRRLDSDPLVNPGHANVTPDQIAHQLIQNGKTNCSRIKMKINRVPELETHQLSSPLNLKELREAIKRCKTGKAPGLDDLMMEQIKHLGPKAENWLLKFYNQCLAHKQIPRAWRKTKIIAILKPGKDASNARNYRPISLLCHLYKVYERMLLNRLGPVIEPKLIAQQAGFRPGKNCTGQILHLTEHIEEGYEKGCITGTVFVDLTAAYDTVQHRKMLHKVYHITRDFDFTKTVQTFLENRSFYVEFQGQKSRWRRQKNGLPQGSVLAPTLFNIFTNDQPQPPLTKSFIYADDLGLTTQAKDFETVEKQLTNALKDLSSYYKENHLKPNPAKTQVCAFHLRNREANRKLKVTWEGQELEHCFHPKYLGVTLDRTLTYRKHCMNTKHKVAARNNILRKLTGSAWGADPQVIRTSALALSFSTAEYACPVWHKSAHAKQVDIALNETCRIITGCLKPTPVDKLYKLAGIAPPDVRREVAANGERKKVEHCESHPLHGYHPPPTRLKSRKGFMRTTTPLDVPPAAARVSLWAAKPGNSNWMAPQEGLPPGANQEWATWKSLNRLRSGVGRSKDNLARWHYLEESSTLCDCGAEQTTQHMYACPQCPASCTEEELFKATDNAVAVARFWSKTI

SEQ ID NO: 154 - protein, 982 aa, synthetic construct
MDEYQRSLSRPLLTIMSINIEGLSLAKEELLAKMSEDISCDILCIQETHRDITMRRPKILGMQLAVERPHRQYGSAIFVRSGVAISATSLTEVNNIEILSVELDSCTVSSLYKPPGADFYFTPPTSCHNHEAHFVVGDFNSHSCVWGYDEDDRNGEAVLTWADNSRMSLLHDSKLPPSFNSGRWKRGYNPDLIFVKESISHQCTKRVLNPIPNTQHRPICCVAYAAVRPKSVPFRRRFNFNKANWTKFTETLEAAISDIEPSIENYDLFVEAVKRSSRLSIPRGCRTSYLPGLNEESLNQLQEYLRLFQENPYSDGTIAAGQKLSTALANAKKDRWIELLENLDMSKSSRKAWQLLRRLDSDPLVNPGHANVTPDQIAHQLIQNGKTNCSRIKMKINRVPELETHQLSSPLNLKELREAIKRCKTGKAPGLDDLMMEQIKHLGPKAENWLLKFYNQCLAHKQIPRAWRKTKIIAILKPGKDASNARNYRPISLLCHLYKVYERMLLNRLGPVIEPKLIAQQAGFRPGKNCTGQILHLTEHIEEGYEKGCITGTVFVDLTAAYDTVQHRKMLHKVYHITRDFDFTKTVQTLLENRSFYVEFQGQKSRWRRQKNGLPQGSVLSPTLFNIFTNDQPQPPLTKSFIYADDLGLTTQAKDFETVEKQLTNALKDLSSYYKENHLKPNPAKTQVCAFHLRNREANRKLKVTWEGQELEHCFHPKYLGVTLDRTLTYRKHCMNTKHKVAARNNILRKLTGSAWGADPQVIRTSALALSFSTAEYACPVWHKSAHAKQVDIALNETCRIITGCLKPTPVDKLYKLAGIAPPDVRREVAANGERKKVEHCESHPLHGYHPPPTRLKSRKGFMRTTTPLDVPPAAARVSLWAAKPGNSNWMAPQEGLPPGANQEWATWKSLNRLRSGVGRSKDNLARWHYLEESSTLCDCGAEQTTQHMYACPQCPASCTEEELFKATDNAVAVARFWSKTI

SEQ ID NO: 155 - protein, 982 aa, synthetic construct
MDEYQRSLSRPLLTIMSINIEGLSLAKEELLAKMSEDISCDILCIQETHRDITMRRPKILGMQLAVERPHRQYGSAIFVRSGVAISATSLTEVNNIEILSVELDSCTVSSLYKPPGADFYFTPPTSCHNHEAHFVVGDFNSHSCVWGYDEDDRNGEAVLTWADNSRMSLLHDSKLPPSFNSGRWKRGYNPDLIFVKESISHQCTKRVLNPIPNTQHRPICCVAYAAVRPKSVPFRRRFNFNKANWTKFTETLEAAISDIEPSIENYDLFVEAVKRSSRLSIPRGCRTSYLPGLNEESLNQLQEYLRLFQENPYSDGTIAAGQKLSTALANAKKDRWIELLENLDMSKSSRKAWQLLRRLDSDPLVNPGHANVTPDQIAHQLIQNGKTNCSRIKMKINRVPELETHQLSSPLNLKELREAIKRCKTGKAPGLDDLMMEQIKHLGPKAENWLLKFYNQCLAHKQIPRAWRKTKIIAILKPGKDASNARNYRPISLLCHLYKVYERMLLNRLGPVIEPKLIAQQAGFRPGKNCTGQILHLTEHIEEGYEKGCITGTVFVDLTAAYDTVQHRKMLHKVYHITRDFDFTKTVQTLLENRSFYVEFQGQKSRWRRQKNGLPQGSVLAPTLFNIFTNDQPQPPLTKSFIYADDLGLTTQAKDFETVEKQLTNALKDLSSYYKENHLKPNPAKTQVCAFHLRNREANRKLKVTWEGQELEHCFHPKYLGVTLDRTLTYRKHCMNTKHKVAARNNILRKLTGSAWGADPQVIRTSALALSFSTAEYACPVWHKSAHAKQVDIALNETCRIITGCLKPTPVDKLYKLAGIAPPDVRREVAANGERKKVEHCESHPLHGYHPPPTRLKSRKGFMRTTTPLDVPPAAARVSLWAAKPGNSNWMAPQEGLPPGANQEWATWKSLNRLRSGVGRSKDNLARWHYLEESSTLCDCGAEQTTQHMIACPQCPASCTEEELFKATDNAVAVARFWSKTI

SEQ ID NO: 156 - protein, 982 aa, synthetic construct
MDEYQRSLSRPLLTIMSINIEGLSLAKEELLAKMSEDISCDILCIQETHRDITMRRPKILGMQLAVERPHRQYGSAIFVRSGVAISATSLTEVNNIEILSVELDSCTVSSLYKPPGADFYFTPPTSCHNHEAHFVVGDFNSHSCVWGYDEDDRNGEAVLTWADNSRMSLLHDSKLPPSFNSGRWKRGYNPDLIFVKESISHQCTKRVLNPIPNTQHRPICCVAYAAVRPKSVPFRRRFNFNKANWTKFTETLEAAISDIEPSIENYDLFVEAVKRSSRLSIPRGCRTSYLPGLNEESLNQLQEYLRLFQENPYSDGTIAAGQKLSTALANAKKDRWIELLENLDMSKSSRKAWQLLRRLDSDPLVNPGHANVTPDQIAHQLIQNGKTNCSRIKMKINRVPELETHQLSSPLNLKELREAIKRCKTGKAPGLDDLMMEQIKHLGPKAENWLLKFYNQCLAHKQIPRAWRKTKIIAILKPGKDASNARNYRPISLLCHLYKVYERMLLNRLGPVIEPKLIAQQAGFRPGKNCTGQILHLTEHIEEGYEKGCITGTVFVDLTAAYDTVQHRKMLHKVYHITRDFDFTKTVQTLLENRSFYVEFQGQKSRWRRQKNGLPQGSVLAPTLFNIFTNDQPQPPLTKSFIYADDLGLTTQAKDFETVEKQLTNALKDLSSYYKENHLKPNPAKTQVCAFHLRNREANRKLKVTWEGQELEHCFHPKYLGVTLDRTLTYRKHCENTKHKVAARNNILRKLTGSAWGADPQVIRTSALALSFSTAEYACPVWHKSAHAKQVDIALNETCRIITGCLKPTPVDKLYKLAGIAPPDVRREVAANGERKKVEHCESHPLHGYHPPPTRLKSRKGFMRTTTPLDVPPAAARVSLWAAKPGNSNWMAPQEGLPPGANQEWATWKSLNRLRSGVGRSKDNLARWHYLEESSTLCDCGAEQTTQHMYACPQCPASCTEEELFKATDNAVAVARFWSKTI

SEQ ID NO: 157 - protein, 982 aa, synthetic construct
MDEYQRSLSRPLLTIMSINIEGLSLAKEELLAKMSEDISCDILCIQETHRDITMRRPKILGMQLAVERPHRQYGSAIFVRSGVAISATSLTEVNNIEILSVELDSCTVSSLYKPPGADFYFTPPTSCHNHEAHFVVGDFNSHSCVWGYDEDDRNGEAVLTWADNSRMSLLHDSKLPPSFNSGRWKRGYNPDLIFVKESISHQCTKRVLNPIPNTQHRPICCVAYAAVRPKSVPFRRRFNFNKANWTKFTETLEAAISDIEPSIENYDLFVEAVKRSSRLSIPRGCRTSYLPGLNEESLNQLQEYLRLFQENPYSDGTIAAGQKLSTALANAKKDRWIELLENLDMSKSSRKAWQLLRRLDSDPLVNPGHANVTPDQIAHQLIQNGKTNCSRIKMKINRVPELETHQLSSPLNLKELREAIKRCKTGKAPGLDDLMMEQIKHLGPKAENWLLKFYNQCLAHKQIPRAWRKTKIIAILKPGKDASNARNYRPISLLCHLYKVYERMLLNRLGPVIEPKLIAQQAGFRPGKNCTGQILHLTEHIEEGYEKGCITGTVFVDLTAAYDTVQHRKMLHKVYHITRDFDFTKTVQTLLENRSFYVEFQGQKSRWRRQKNGLPQGSVLAPTLFNIFTNDQPQPPLTKSFIYADDLGLTTQAKDFETVEKQLTNALKDLSSYYKENHLKPNPAKTQVCAFHLRNREANRKLKVTWEGQELEHCFHPKYLGVTLDRTLTYRKHCMNTKHKVAARNNILRKLTGSAWGADPQVIRTSALALSFSTAEYACPVWHKSAHAKQVDIALNETCRIITGCLKPTPVDKLYKLAGIAPPDVRREVAANGERKKVEHCESHPLHGYHPPPTRLKSRKGFMRTTTPLDVPPAAARVSLWAAKPPNSNWMAPQEGLPPGANQEWATWKSLNRLRSGVGRSKDNLARWHYLEESSTLCDCGAEQTTQHMYACPQCPASCTEEELFKATDNAVAVARFWSKTI

SEQ ID NO: 158 - protein, 982 aa, synthetic construct
MDEYQRSLSRPLLTIMSINIEGLSLAKEELLAKMSEDISCDILCIQETHRDITMRRPKILGMQLAVERPHRQYGSAIFVRSGVAISATSLTEVNNIEILSVELDSCTVSSLYKPPGADFYFTPPTSCHNHEAHFVVGDFNSHSCVWGYDEDDRNGEAVLTWADNSRMSLLHDSKLPPSFNSGRWKRGYNPDLIFVKESISHQCTKRVLNPIPNTQHRPICCVAYAAVRPKSVPFRRRFNFNKANWTKFTETLEAAISDIEPSIENYDLFVEAVKRSSRLSIPRGCRTSYLPGLNEESLNLLQEYLRLFQENPYSDGTIAAGQKLSTALANAKKDRWIELLENLDMSKSSRKAWQLLRRLDSDPLVNPGHANVTPDQIAHQLIQNGKTNCSRIKMKINRVPELETHQLSSPLNLKELREAIKRCKTGKAPGLDDLMMEQIKHLGPKAENWLLKFYNQCLAHKQIPRAWRKTKIIAILKPGKDASNARNYRPISLLCHLYKVYERMLLNRLGPVIEPKLIAQQAGFRPGKNCTGQILHLTEHIEEGYEKGCITGTVFVDLTAAYDTVQHRKMLHKVYHITRDFDFTKTVQTLLENRSFYVEFQGQKSRWRRQKNGLPQGSVLAPTLFNIFTNDQPQPPLTKSFIYADDLGLTTQAKDFETVEKQLTNALKDLSSYYKENHLKPNPAKTQVCAFHLRNREANRKLKVTWEGQELEHCFHPKYLGVTLDRTLTYRKHCMNTKHKVAARNNILRKLTGSAWGADPQVIRTSALALSFSTAEYACPVWHKSAHAKQVDIALNETCRIITGCLKPTPVDKLYKLAGIAPPDVRREVAANGERKKVEHCESHPLHGYHPPPTRLKSRKGFMRTTTPLDVPPAAARVSLWAAKPGNSNWMAPQEGLPPGANQEWATWKSLNRLRSGVGRSKDNLARWHYLEESSTLCDCGAEQTTQHMYACPQCPASCTEEELFKATDNAVAVARFWSKTI

SEQ ID NO: 159 - protein, 982 aa, synthetic construct
MDEYQRSLSRPLLTIMSINIEGLSLAKEELLAKMSEDISCDILCIQETHRDITMRRPKILGMQLAVERPHRQYGSAIFVRSGVAISATSLTEVNNIEILSVELDSCTVSSLYKPPGADFYFTPPTSCHNHEAHFVVGDFNSHSCVWGYDEDDRNGEAVLTWADNSRMSLLHDSKLPPSFNSGRWKRGYNPDLIFVKESISHQCTKRVLNPIPNTQHRPICCVAYAAVRPKSVPFRRRFNFNKANWTKFTETLEAAISDIEPSIENYDLFVEAVKRSSRLSIPRGCRTSYLPGLNEESLNQLQEYLRLFQENPYSDGTIAAGQKLSTALANAKKDRWIELLENLDMSKSSRKAWQLLRRLDSDPLVNPGHANVTPDQIAHQLIQNGKTNCSRIKMKINRVPELETHQLSSPLNLKELREAIKRCKTGKAPGLDDLMMEQIKHLGPKAENWLLKFYNQCLAHKQIPRAWRKTKIIAILKPGKDASNARNYRPISLLCHLYKVYERMLLNRLGPVIEPKLIPQQAGFRPGKNCTGQILHLTEHIEEGYEKGCITGTVFVDLTAAYDTVQHRKMLHKVYHITRDFDFTKTVQTLLENRSFYVEFQGQKSRWRRQKNGLPQGSVLAPTLFNIFTNDQPQPPLTKSFIYADDLGLTTQAKDFETVEKQLTNALKDLSSYYKENHLKPNPAKTQVCAFHLRNREANRKLKVTWEGQELEHCFHPKYLGVTLDRTLTYRKHCMNTKHKVAARNNILRKLTGSAWGADPQVIRTSALALSFSTAEYACPVWHKSAHAKQVDIALNETCRIITGCLKPTPVDKLYKLAGIAPPDVRREVAANGERKKVEHCESHPLHGYHPPPTRLKSRKGFMRTTTPLDVPPAAARVSLWAAKPGNSNWMAPQEGLPPGANQEWATWKSLNRLRSGVGRSKDNLARWHYLEESSTLCDCGAEQTTQHMYACPQCPASCTEEELFKATDNAVAVARFWSKTI

SEQ ID NO: 160 - protein, 982 aa, synthetic construct
MDEYQRSLSRPLLTIMSINIEGLSLAKEELLAKMSEDISCDILCIQETHRDITMRRPKILGMQLAVERPHRQYGSAIFVRSGVAISATSLTEVNNIEILSVELDSCTVSSLYKPPGADFYFTPPTSCHNHEAHFVVGDFNSHSCVWGYDEDDRNGEAVLTWADNSRMSLLHDSKLPPSFNSGRWKRGYNPDLIFVKESISHQCTKRVLNPIPNTQHRPICCVAYAAVRPKSVPFRRRFNFNKANWTKFTETLEAAISDIEPSIENYDLFVEAVKRSSRLSIPRGCRTSYLPGLNEESLNQLQEYLRLFQENPYSDGTIAAGQKLSTALANAKKDRWIELLENLDMSKSSRKAWQLLRRLDSDPLVNPGHANVTPDQIAHQLIQNGKTNCSRIKMKINRVPELETHQLSSPLNLKELREAIKRCKTGKAPGLDDLMMEQIKHLGPKAENWLLKFYNQCLAHKQIPRAWRKTKIIAILKPGKDASNARNYRPISLLCHLYKVYERMLLNRLGPVIEPKLIAQQAGFRPGKNCTGQILHLTEHIEEGYEKGCITGTVFVDLTAAYDTVQHRKMLHKVYHITRDFDFTKTVQTLLENRSFYVEFQGQKSRWRRQKNGLPQGSVLAPTLFNIFTNDQPQPPLTKSFIYADDLGLTTQAKDFETVEKQLTNALKDLSSYYKENHLKPNPAKTQVCAFHLRNREANRKLKVTWEGQELEHCFHPKYLGVTLDRTLTYRKHCMNTKHKVAARNNILRKLTGSAWGADPQVIRTSALALSFSTAEYACPVWHKSAHAKQVDIALNETCRIITGCLKPTPVDKLYKLAGIAPPDVRREVAANVERKKVEHCESHPLHGYHPPPTRLKSRKGFMRTTTPLDVPPAAARVSLWAAKPGNSNWMAPQEGLPPGANQEWATWKSLNRLRSGVGRSKDNLARWHYLEESSTLCDCGAEQTTQHMYACPQCPASCTEEELFKATDNAVAVARFWSKTI

SEQ ID NO: 161 - protein, 982 aa, synthetic construct
MDEYQRSLSRPLLTIMSINIEGLSLAKEELLAKMSEDISCDILCIQETHRDITMRRPKILGMQLAVERPHRQYGSAIFVRSGVAISATSLTEVNNIEILSVELDSCTVSSLYKPPGADFYFTPPTSCHNHEAHFVVGDFNSHSCVWGYDEDDRNGEAVLTWADNSRMSLLHDSKLPPSFNSGRWKRGYNPDLIFVKESISHQCTKRVLNPIPNTQHRPICCVAYAAVRPKSVPFRRRFNFNKANWTKFTETLEAAISDIEPSIENYDLFVEAVKRSSRLSIPRGCRTSYLPGLNEESLNQLQEYLRLFQENPYSDGTIAAGQKLSTALANAKKDRWIELLENLDMSKSSRKAWQLLRRLDSDPLVNPGHANVTPDQIAHQLIQNGKTNCSRIKMKINRVPELETHQLSSPLNLKELREAIKRCKTGKAPGLDDLMMEQIKHLGPKAENWLLKFYNQCLAHKQIPRAWRKTKIIAILKPGKDASNARNYRPISLLCHLYKVYERMLLNRLGPVIEPKLIAQQAGFRPGKNCTGQILHLTEHIEEGYEKGCITGTVFVDLTAAYDTVQHRKMLHKVYHITRDFDFTKTVQTLLENRSFYVEFQGQKSRWRRQKNGLPQGSVLAPTLFNIFTNDQPQPPLTKSFIYADDLGLTTQAKDFETVEKQLTNALKDLSSYYKENHLKPNPAKTQVCAFHLRNREANRKLKVTWEGQELEHCFHPKYLGVTLDRTLTYRKHCMNTKHKVAARNNILRKLTGSAWGADPQVIRTSALALSFSTAEYACPVWHRSAHAKQVDIALNETCRIITGCLKPTPVDKLYKLAGIAPPDVRREVAANGERKKVEHCESHPLHGYHPPPTRLKSRKGFMRTTTPLDVPPAAARVSLWAAKPGNSNWMAPQEGLPPGANQEWATWKSLNRLRSGVGRSKDNLARWHYLEESSTLCDCGAEQTTQHMYACPQCPASCTEEELFKATDNAVAVARFWSKTI

SEQ ID NO: 162 - protein, 982 aa, synthetic construct
MDEYQRSLSRPLLTIMSINIEGLSLAKEELLAKMSEDISCDILCIQETHRDITMRRPKILGMQLAVERPHRQYGSAIFVRSGVAISATSLTEVNNIEILSVELDSCTVSSLYKPPGADFYFTPPTSCHNHEAHFVVGDFNSHSCVWGYDEDDRNGEAVLTWADNSRMSLLHDSKLPPSFNSGRWKRGYNPDLIFVKESISHQCTKRVLNPIPNTQHRPICCVAYAAVRPKSVPFRRRFNFNKANWTKFTETLEAAISDIEPSIENYDLFVEAVKRSSRLSIPRGCRTSYLPGLNEESLNQLQEYLRLFQENPYSDGTIAAGQKLSTALANAKKDRWIELLENLDMSKSSRKAWQLLRRLDSDPLVNPGHANVTPDQIAHQLIQNGKTNCSRIKMKINRVPELETHQLSSPLNLKELREAIKRCKTGKAPGLDDLMMEQIKHLGPKAENWLLKFYNQCLAHKQIPRAWRKTKIIAILKPGKDASNARNYRPISLLCHLYKVYERMLLNRLGPVIAPKLIAQQAGFRPGKNCTGQILHLTEHIEEGYEKGCITGTVFVDLTAAYDTVQHRKMLHKVYHITRDFDFTKTVQTLLENRSFYVEFQGQKSRWRRQKNGLPQGSVLAPTLFNIFTNDQPQPPLTKSFIYADDLGLTTQAKDFETVEKQLTNALKDLSSYYKENHLKPNPAKTQVCAFHLRNREANRKLKVTWEGQELEHCFHPKYLGVTLDRTLTYRKHCMNTKHKVAARNNILRKLTGSAWGADPQVIRTSALALSFSTAEYACPVWHKSAHAKQVDIALNETCRIITGCLKPTPVDKLYKLAGIAPPDVRREVAANGERKKVEHCESHPLHGYHPPPTRLKSRKGFMRTTTPLDVPPAAARVSLWAAKPGNSNWMAPQEGLPPGANQEWATWKSLNRLRSGVGRSKDNLARWHYLEESSTLCDCGAEQTTQHMYACPQCPASCTEEELFKATDNAVAVARFWSKTI

SEQ ID NO: 163 - protein, 982 aa, synthetic construct
MDEYQRSLSRPLLTIMSINIEGLSLAKEELLAKMSEDISCDILCIQETHRDITMRRPKILGMQLAVERPHRQYGSAIFVRSGVAISATSLTEVNNIEILSVELDSCTVSSLYKPPGADFYFTPPTSCHNHEAHFVVGDFNSHSCVWGYDEDDRNGEAVLTWADNSRMSLLHDSKLPPSFNSGRWKRGYNPDLIFVKESISHQCTKRVLNPIPNTQHRPICCVAYAAVRPKSVPFRRRFNFNKANWTKFTETLEAAISDIEPSIENYDLFVEAVKRSSRLSIPRGCRTSYLPGLNEESLNQLQEYLRLFQENPYSDGTIAAGQKLSTALANAKKDRWIELLENLDMSKSSRKAWQLLRRLDSDPLVNPGHANVTPDQIAHQLIQNGKTNCSRIKMKINRVPELETHQLSSPLNLKELREAIKRCKTGKAPGLDDLMMEQIKHLGPKAENWLLKFYNQCLAHKQIPRAWRKTKIIAILKPGKDASNARNYRPISLLCHLYKVYERMLLNRLGPVIEPKLIAQQAGFRPGKNCTGQILHLTEHIEEGYEKGCITGTVFVDLTAAYDTVQHRKMLHKVYHITRDFDFTKTVQTLLENRSFYVEFQGQKSRWRRQKNGLPQGSVLAPTLFNIFTNDQPQPPLTKSFIYADDLGLTTQAKDFETVEKQLTNALKDLSSYYKENHLKPNPAKTQVCAFHLRNREANRKLKVTWEGQELEHCFHPKYLGVTLDRTLTYRKHCMNTKHKVAARNNILRKLTGSAWGADPQVIRTSALALSFSTAEYACPVWHKSAHAKQVDIALNETCRIITGCLKPTPVDKLYKLAGIAPPDVRREVAANGERKKVEHCESHPLHGYHPPPTRLKSRKGFMRTTTPLDVPPAAARVSLWAAKPGNSNWMAPQEGLPPGANQEWATWKSLNRLRSGVGRSKDNLARWHYLEESSTLDDCGAEQTTQHMYACPQCPASCTEEELFKATDNAVAVARFWSKTI

SEQ ID NO: 164 - protein, 982 aa, synthetic construct
MDEYQRSLSRPLLTIMSINIEGLSLAKEELLAKMSEDISCDILCIQETHRDITMRRPKILGMQLAVERPHRQYGSAIFVRSGVAISATSLTEVNNIEILSVELDSCTVSSLYKPPGADFYFTPPTSCHNHEAHFVVGDFNSHSCVWGYDEDDRNGEAVLTWADNSRMSLLHDSKLPPSFNSGRWKRGYNPDLIFVKESISHQCTKRVLNPIPNTQHRPICCVAYAAVRPKSVPFRRRFNFNKANWTKFTETLEAAISDIEPSIENYDLFVEAVKRSSRLSIPRGCRTSYLPGLNEESLNQLQEYLRLFQENPYSDGTIAAGQKLSTALANAKKDRWIELLENLDMSKSSRKAWQLLRRLDSDPLVNPGHANVTPDQIAHQLIQNGKTNCSRIKMKINRVPELETHQLSSPLNLKELREAIKRCKTGKAPGLDDLMMEQIKHLGPKAENWLLKFYNQCLAHKQIPRAWRKTKIIAILKPGKDASNARNYRPISLLCHLYKVYERMLLNRLGPVIEKKLIAQQAGFRPGKNCTGQILHLTEHIEEGYEKGCITGTVFVDLTAAYDTVQHRKMLHKVYHITRDFDFTKTVQTLLENRSFYVEFQGQKSRWRRQKNGLPQGSVLAPTLFNIFTNDQPQPPLTKSFIYADDLGLTTQAKDFETVEKQLTNALKDLSSYYKENHLKPNPAKTQVCAFHLRNREANRKLKVTWEGQELEHCFHPKYLGVTLDRTLTYRKHCMNTKHKVAARNNILRKLTGSAWGADPQVIRTSALALSFSTAEYACPVWHKSAHAKQVDIALNETCRIITGCLKPTPVDKLYKLAGIAPPDVRREVAANGERKKVEHCESHPLHGYHPPPTRLKSRKGFMRTTTPLDVPPAAARVSLWAAKPGNSNWMAPQEGLPPGANQEWATWKSLNRLRSGVGRSKDNLARWHYLEESSTLCDCGAEQTTQHMYACPQCPASCTEEELFKATDNAVAVARFWSKTI

SEQ ID NO: 165 - protein, 982 aa, synthetic construct
MDEYQRSLSRPLLTIMSINIEGLSLAKEELLAKMSEDISCDILCIQETHRDITMRRPKILGMQLAVERPHRQYGSAIFVRSGVAISATSLTEVNNIEILSVELDSCTVSSLYKPPGADFYFTPPTSCHNHEAHFVVGDFNSHSCVWGYDEDDRNGEAVLTWADNSRMSLLHDSKLPPSFNSGRWKRGYNPDLIFVKESISHQCTKRVLNPIPNTQHRPICCVAYAAVRPKSVPFRRRFNFNKANWTKFTETLEAAISDIEPSIENYDLFVEAVKRSSRLSIPRGCRTSYLPGLNEESLNQLQEYLRLFQENPYSDGTIAAGQKLSTALANAKKDRWIELLENLDMSKSSRKAWQLLRRLDSDPLVNPGHANVTPDQIAHQLIQNGKTNCSRIKMKINRVPELETHQLSSPLNLKELREAIKRCKTGKAPGLDDLMMEQIKHLGPKAENWLLKFYNQCLAHKQIPRAWRKTKIIAILKPGKDASNARNYRPISLLCHLYKVYERMLLNRLGPVIEPKLIAQQAGFRPGKNCTGQILHLTEHIEEGYEKGCITGTVFVDLTAAYDTVQHRKMLHKVYHITRDFDFTKTVQTLLENRSFYVEFQGQKSRWRRQKNGLPQGSVLAPTLFNIFTNDQPQPPLTKSFIYADDLGLTTQAKDFETVEKQLTNALKDLSSYYKENHLKPNPAKTQVCAFHLRNREANRKLKVTWEGQELEHCFHPKYLGVTLDRTLTYRKHCMNTKHKVAARNNILRKLTGSAWGADPQVIRTSALALSFSTAEYACAVWHKSAHAKQVDIALNETCRIITGCLKPTPVDKLYKLAGIAPPDVRREVAANGERKKVEHCESHPLHGYHPPPTRLKSRKGFMRTTTPLDVPPAAARVSLWAAKPGNSNWMAPQEGLPPGANQEWATWKSLNRLRSGVGRSKDNLARWHYLEESSTLCDCGAEQTTQHMYACPQCPASCTEEELFKATDNAVAVARFWSKTI

SEQ ID NO: 166 - protein, 982 aa, synthetic construct
MDEYQRSLSRPLLTIMSINIEGLSLAKEELLAKMSEDISCDILCIQETHRDITMRRPKILGMQLAVERPHRQYGSAIFVRSGVAISATSLTEVNNIEILSVELDSCTVSSLYKPPGADFYFTPPTSCHNHEAHFVVGDFNSHSCVWGYDEDDRNGEAVLTWADNSRMSLLHDSKLPPSFNSGRWKRGYNPDLIFVKESISHQCTKRVLNPIPNTQHRPICCVAYAAVRPKSVPFRRRFNFNKANWTKFTETLEAAISDIEPSIENYDLFVEAVKRSSRLSIPRGCRTSYLPGLNEESLNQLQEYLRLFQENPYSDGTIAAGQKLSTALANAKKDRWIELLENLDMSKSSRKAWQLLRRLDSDPLVNPGHANVTPDQIAHQLIQNGKTNCSRIKMKINRVPELETHQLSSPLNLKELREAIKRCKTGKAPGLDDLMMEQIKHLGPKAENWLLKFYNQCLAHKQIPRAWRKTKIIAILKPGKDASNARNYRPISLLCHLYKVYERMLLNRLGPVIEPKLIAQQAGFRPGKNCTGQILHLTEHIEEGYEKGCITGTVFVDLTAAYDTVQHRKMLHKVYHITRDFDFTKTVQTLLENRSFYVEFQGQKSRWRRQKNGLPQGSVLAPTLFNIFTNDQPQPPLTKSFIYADDLGLTTQAKDFETVEKQLTNALKDLSSYYKENHLKPNPAKTQVCAFHLRNREANRKLKVTWEGQELEHCFHPKYLGVTLDRTLTYRKHCMNTKHKVAARNNILRKLTGSAWGADPQVIRTSALALSFSTAEYACPVWHKSAHAKQVDIALNETCRIITGCLAPTPVDKLYKLAGIAPPDVRREVAANGERKKVEHCESHPLHGYHPPPTRLKSRKGFMRTTTPLDVPPAAARVSLWAAKPGNSNWMAPQEGLPPGANQEWATWKSLNRLRSGVGRSKDNLARWHYLEESSTLCDCGAEQTTQHMYACPQCPASCTEEELFKATDNAVAVARFWSKTI

SEQ ID NO: 167 - protein, 982 aa, synthetic construct
MDEYQRSLSRPLLTIMSINIEGLSLAKEELLAKMSEDISCDILCIQETHRDITMRRPKILGMQLAVERPHRQYGSAIFVRSGVAISATSLTEVNNIEILSVELDSCTVSSLYKPPGADFYFTPPTSCHNHEAHFVVGDFNSHSCVWGYDEDDRNGEAVLTWADNSRMSLLHDSKLPPSFNSGRWKRGYNPDLIFVKESISHQCTKRVLNPIPNTQHRPICCVAYAAVRPKSVPFRRRFNFNKANWTKFTETLEAAISDIEPSIENYDLFVEAVKRSSRLSIPRGCRTSYLPGLNEESLNQLQEYLRLFQENPYSDGTIAAGQKLSTALANAKKDRWIELLENLDMSKSSRKAWQLLRRLDSDPLVNPGHANVTPDQIAHQLIQNGKTNCSRIKMKINRVPELETHQLSSPLNLRELREAIKRCKTGKAPGLDDLMMEQIKHLGPKAENWLLKFYNQCLAHKQIPRAWRKTKIIAILKPGKDASNARNYRPISLLCHLYKVYERMLLNRLGPVIEPKLIAQQAGFRPGKNCTGQILHLTEHIEEGYEKGCITGTVFVDLTAAYDTVQHRKMLHKVYHITRDFDFTKTVQTLLENRSFYVEFQGQKSRWRRQKNGLPQGSVLAPTLFNIFTNDQPQPPLTKSFIYADDLGLTTQAKDFETVEKQLTNALKDLSSYYKENHLKPNPAKTQVCAFHLRNREANRKLKVTWEGQELEHCFHPKYLGVTLDRTLTYRKHCMNTKHKVAARNNILRKLTGSAWGADPQVIRTSALALSFSTAEYACPVWHKSAHAKQVDIALNETCRIITGCLKPTPVDKLYKLAGIAPPDVRREVAANGERKKVEHCESHPLHGYHPPPTRLKSRKGFMRTTTPLDVPPAAARVSLWAAKPGNSNWMAPQEGLPPGANQEWATWKSLNRLRSGVGRSKDNLARWHYLEESSTLCDCGAEQTTQHMYACPQCPASCTEEELFKATDNAVAVARFWSKTI

SEQ ID NO: 168 - protein, 982 aa, synthetic construct
MDEYQRSLSRPLLTIMSINIEGLSLAKEELLAKMSEDISCDILCIQETHRDITMRRPKILGMQLAVERPHRQYGSAIFVRSGVAISATSLTEVNNIEILSVELDSCTVSSLYKPPGADFYFTPPTSCHNHEAHFVVGDFNSHSCVWGYDEDDRNGEAVLTWADNSRMSLLHDSKLPPSFNSGRWKRGYNPDLIFVKESISHQCTKRVLNPIPNTQHRPICCVAYAAVRPKSVPFRRRFNFNKANWTKFTETLEAAISDIEPSIENYDLFVEAVKRSSRLSIPRGCRTSYLPGLNEESLNQLQEYLRLFQENPYSDGTIAAGQKLSTALANAKKDRWIELLENLDMSKSSRKAWQLLRRLDSDPLVNPGHANVTPDQIAHQLIQNGKTNCSRIKMKINRVPELETHQLSSPLNLKELREAIKRCKTGKAPGLDDLMMEQIKHLGPKAENWLLKFYNQCLAHKQIPRAWRKTKIIAILKPGKDASNARNYRPISLLCHLYKVYERMLLNRLGPVIEPKLIAQQAGFRPGKNCTGQILHLTEHIEEGYEKGCITGTVFVDLTAAYDTVQHRKMLHKVYHITRDFDFTKTVQTLLENRSFYVEFQGQKSRWRRQKNGLPQGSVLAPTLFNIFTNDQPQPPLTKSFIYADDLGLTTQAKDFETVEKQLTNALKDLSSYYKENHLKPNPAKTQVCAFHLRNREANRKLKVTWEGQELEHCFHPKYLGVTLDRTLTYRKHCMNTKHKVAARNNILRKLTGSAWGADPQVIRTSALALSFSTAEYACPVWHKSAHAKQVDIALNETCRIITGCLKPTPVDKLYKLAGIAPPDVRREVAANGERKKVEHCESHPLHGYHPPPTRLKSRKGFMRTTTPLDVPPAAARVSLWAAKPGNSNWMAPQEGLPPGANQEWATWKSLNRLRSGVGRSKDNLARWHYLEESSTLCDCGAEQTTQHMYACPQCPASCTEEELFRATDNAVAVARFWSKTI

SEQ ID NO: 169 - protein, 982 aa, synthetic construct
MDEYQRSLSRPLLTIMSINIEGLSLAKEELLAKMSEDISCDILCIQETHRDITMRRPKILGMQLAVERPHRQYGSAIFVRSGVAISATSLTEVNNIEILSVELDSCTVSSLYKPPGADFYFTPPTSCHNHEAHFVVGDFNSHSCVWGYDEDDRNGEAVLTWADNSRMSLLHDSKLPPSFNSGRWKRGYNPDLIFVKESISHQCTKRVLNPIPNTQHRPICCVAYAAVRPKSVPFRRRFNFNKANWTKFTETLEAAISDIEPSIENYDLFVEAVKRSSRLSIPRGCRTSYLPGLNEESLNQLQEYLRLFQENPYSDGTIAAGQKLSTALANAKKDRWIELLENLDMSKSSRKAWQLLRRLDSDPLVNPGHANVTPDQIAHQLIQNGKTNCSRIKMKINRVPELETHQLSSPLNLKELREAIKRCKTGKAPGLDDLMMEQIKHLGPKAENWLLKFYNQCLAHKQIPRAWRKTKIIAILKPGKDASNARNYRPISLLCHLYKVYERMLLNRLGPVIEPKLIAQQAGFRPGKNCTGQILHLTEHIEEGYEKGCITGTVFVDLTAAFDTVQHRKMLHKVYHITRDFDFTKTVQTLLENRSFYVEFQGQKSRWRRQKNGLPQGSVLAPTLFNIFTNDQPQPPLTKSFIYADDLGLTTQAKDFETVEKQLTNALKDLSSYYKENHLKPNPAKTQVCAFHLRNREANRKLKVTWEGQELEHCFHPKYLGVTLDRTLTYRKHCMNTKHKVAARNNILRKLTGSAWGADPQVIRTSALALSFSTAEYACPVWHKSAHAKQVDIALNETCRIITGCLKPTPVDKLYKLAGIAPPDVRREVAANGERKKVEHCESHPLHGYHPPPTRLKSRKGFMRTTTPLDVPPAAARVSLWAAKPGNSNWMAPQEGLPPGANQEWATWKSLNRLRSGVGRSKDNLARWHYLEESSTLCDCGAEQTTQHMYACPQCPASCTEEELFKATDNAVAVARFWSKTI

SEQ ID NO: 170 - protein, 982 aa, synthetic construct
MDEYQRSLSRPLLTIMSINIEGLSLAKEELLAKMSEDISCDILCIQETHRDITMRRPKILGMQLAVERPHRQYGSAIFVRSGVAISATSLTEVNNIEILSVELDSCTVSSLYKPPGADFYFTPPTSCHNHEAHFVVGDFNSHSCVWGYDEDDRNGEAVLTWADNSRMSLLHDSKLPPSFNSGRWKRGYNPDLIFVKESISHQCTKRVLNPIPNTQHRPICCVAYAAVRPKSVPFRRRFNFNKANWTKFTETLEAAISDIEPSIENYDLFVEAVKRSSRLSIPRGCRTSYLPGLNEESLNQLQEYLRLFQENPYSDGTIAAGQKLSTALANAKKDRWIELLENLDMSKSSRKAWQLLRRLDSDPLVNPGHANVTPDQIAHQLIQNGKTNCSRIKMKINRVPELETHQLSSPLNLKELREAIKRCKTGKAPGLDDLMMEQIKHLGPKAENWLLKFYNQCLAHKQIPRAWRKTKIIAILKPGKDASNARNYRPISLLCHLYKVYERMLLNRLGPVIEPKLIAQQAGFRPGKNCTGQILHLTEHIEEGYEKGCITGTVFVDLTAAYDTVQHRKMLHKVYHITRDFDFTKTVQTLLENRSFYVEFQGQKSRWRRQKNGLPQGSVLAPTLFNIFTNDQPQPPLTKSFIYADDLGLTTQAKDFETVEKQLTNALKDLSSYYKENHLKPNPAKTQVCAFHLRNREANRKLKVTWEGQELEHCFHPKYLGVTLDRTLTYRKHCMNTKHKVMARNNILRKLTGSAWGADPQVIRTSALALSFSTAEYACPVWHKSAHAKQVDIALNETCRIITGCLKPTPVDKLYKLAGIAPPDVRREVAANGERKKVEHCESHPLHGYHPPPTRLKSRKGFMRTTTPLDVPPAAARVSLWAAKPGNSNWMAPQEGLPPGANQEWATWKSLNRLRSGVGRSKDNLARWHYLEESSTLCDCGAEQTTQHMYACPQCPASCTEEELFKATDNAVAVARFWSKTI

SEQ ID NO: 171 - protein, 982 aa, synthetic construct
MDEYQRSLSRPLLTIMSINIEGLSLAKEELLAKMSEDISCDILCIQETHRDITMRRPKILGMQLAVERPHRQYGSAIFVRSGVAISATSLTEVNNIEILSVELDSCTVSSLYKPPGADFYFTPPTSCHNHEAHFVVGDFNSHSCVWGYDEDDRNGEAVLTWADNSRMSLLHDSKLPPSFNSGRWKRGYNPDLIFVKESISHQCTKRVLNPIPNTQHRPICCVAYAAVRPKSVPFRRRFNFNKANWTKFTETLEAAISDIEPSIENYDLFVEAVKRSSRLSIPRGCRTSYLPGLNEESLNQLQEYLRLFQENPYSDGTIAAGQKLSTALANAKKDRWIELLENLDMSKSSRKAWQLLRRLDSDPLVNPGHANVTPDQIAHQLIQNGKTNCSRIKMKINRVPELETHQLSSPLNLKELREAIKRCKTGKAPGLDDLMMEQIKHLGPKAENWLLKFYNQCLARKQIPRAWRKTKIIAILKPGKDASNARNYRPISLLCHLYKVYERMLLNRLGPVIEPKLIAQQAGFRPGKNCTGQILHLTEHIEEGYEKGCITGTVFVDLTAAYDTVQHRKMLHKVYHITRDFDFTKTVQTLLENRSFYVEFQGQKSRWRRQKNGLPQGSVLAPTLFNIFTNDQPQPPLTKSFIYADDLGLTTQAKDFETVEKQLTNALKDLSSYYKENHLKPNPAKTQVCAFHLRNREANRKLKVTWEGQELEHCFHPKYLGVTLDRTLTYRKHCMNTKHKVAARNNILRKLTGSAWGADPQVIRTSALALSFSTAEYACPVWHKSAHAKQVDIALNETCRIITGCLKPTPVDKLYKLAGIAPPDVRREVAANGERKKVEHCESHPLHGYHPPPTRLKSRKGFMRTTTPLDVPPAAARVSLWAAKPGNSNWMAPQEGLPPGANQEWATWKSLNRLRSGVGRSKDNLARWHYLEESSTLCDCGAEQTTQHMYACPQCPASCTEEELFKATDNAVAVARFWSKTI

SEQ ID NO: 172 - protein, 982 aa, synthetic construct
MDEYQRSLSRPLLTIMSINIEGLSLAKEELLAKMSEDISCDILCIQETHRDITMRRPKILGMQLAVERPHRQYGSAIFVRSGVAISATSLTEVNNIEILSVELDSCTVSSLYKPPGADFYFTPPTSCHNHEAHFVVGDFNSHSCVWGYDEDDRNGEAVLTWADNSRMSLLHDSKLPPSFNSGRWKRGYNPDLIFVKESISHQCTKRVLNPIPNTQHRPICCVAYAAVRPKSVPFRRRFNFNKANWTKFTETLEAAISDIEPSIENYDLFVEAVKRSSRLSIPRGCRTSYLPGLNEESLNQLQEYLRLFQENPYSDGTIAAGQKLSTALANAKKDRWIELLENLDMSKSSRKAWQLLRRLDSDPLVNPGHANVTPDQIAHQLIQNGKTNCSRIKMKINRVPELETHQLSSPLNLKELRRAIKRCKTGKAPGLDDLMMEQIKHLGPKAENWLLKFYNQCLAHKQIPRAWRKTKIIAILKPGKDASNARNYRPISLLCHLYKVYERMLLNRLGPVIEPKLIAQQAGFRPGKNCTGQILHLTEHIEEGYEKGCITGTVFVDLTAAYDTVQHRKMLHKVYHITRDFDFTKTVQTLLENRSFYVEFQGQKSRWRRQKNGLPQGSVLAPTLFNIFTNDQPQPPLTKSFIYADDLGLTTQAKDFETVEKQLTNALKDLSSYYKENHLKPNPAKTQVCAFHLRNREANRKLKVTWEGQELEHCFHPKYLGVTLDRTLTYRKHCMNTKHKVAARNNILRKLTGSAWGADPQVIRTSALALSFSTAEYACPVWHKSAHAKQVDIALNETCRIITGCLKPTPVDKLYKLAGIAPPDVRREVAANGERKKVEHCESHPLHGYHPPPTRLKSRKGFMRTTTPLDVPPAAARVSLWAAKPGNSNWMAPQEGLPPGANQEWATWKSLNRLRSGVGRSKDNLARWHYLEESSTLCDCGAEQTTQHMYACPQCPASCTEEELFKATDNAVAVARFWSKTI

SEQ ID NO: 173 - protein, 982 aa, synthetic construct
MDEYQRSLSRPLLTIMSINIEGLSLAKEELLAKMSEDISCDILCIQETHRDITMRRPKILGMQLAVERPHRQYGSAIFVRSGVAISATSLTEVNNIEILSVELDSCTVSSLYKPPGADFYFTPPTSCHNHEAHFVVGDFNSHSCVWGYDEDDRNGEAVLTWADNSRMSLLHDSKLPPSFNSGRWKRGYNPDLIFVKESISHQCTKRVLNPIPNTQHRPICCVAYAAVRPKSVPFRRRFNFNKANWTKFTETLEAAISDIEPSIENYDLFVEAVKRSSRLSIPRGCRTSYLPGLNEESLNQLQEYLRLFQENPYSDGTIAAGQKLSTALANAKKERWIELLENLDMSKSSRKAWQLLRRLDSDPLVNPGHANVTPDQIAHQLIQNGKTNCSRIKMKINRVPELETHQLSSPLNLKELREAIKRCKTGKAPGLDDLMMEQIKHLGPKAENWLLKFYNQCLAHKQIPRAWRKTKIIAILKPGKDASNARNYRPISLLCHLYKVYERMLLNRLGPVIEPKLIAQQAGFRPGKNCTGQILHLTEHIEEGYEKGCITGTVFVDLTAAYDTVQHRKMLHKVYHITRDFDFTKTVQTLLENRSFYVEFQGQKSRWRRQKNGLPQGSVLAPTLFNIFTNDQPQPPLTKSFIYADDLGLTTQAKDFETVEKQLTNALKDLSSYYKENHLKPNPAKTQVCAFHLRNREANRKLKVTWEGQELEHCFHPKYLGVTLDRTLTYRKHCMNTKHKVAARNNILRKLTGSAWGADPQVIRTSALALSFSTAEYACPVWHKSAHAKQVDIALNETCRIITGCLKPTPVDKLYKLAGIAPPDVRREVAANGERKKVEHCESHPLHGYHPPPTRLKSRKGFMRTTTPLDVPPAAARVSLWAAKPGNSNWMAPQEGLPPGANQEWATWKSLNRLRSGVGRSKDNLARWHYLEESSTLCDCGAEQTTQHMYACPQCPASCTEEELFKATDNAVAVARFWSKTI

SEQ ID NO: 174 - protein, 982 aa, synthetic construct
MDEYQRSLSRPLLTIMSINIEGLSLAKEELLAKMSEDISCDILCIQETHRDITMRRPKILGMQLAVERPHRQYGSAIFVRSGVAISATSLTEVNNIEILSVELDSCTVSSLYKPPGADFYFTPPTSCHNHEAHFVVGDFNSHSCVWGYDEDDRNGEAVLTWADNSRMSLLHDSKLPPSFNSGRWKRGYNPALIFVKESISHQCTKRVLNPIPNTQHRPICCVAYAAVRPKSVPFRRRFNFNKANWTKFTETLEAAISDIEPSIENYDLFVEAVKRSSRLSIPRGCRTSYLPGLNEESLNQLQEYLRLFQENPYSDGTIAAGQKLSTALANAKKDRWIELLENLDMSKSSRKAWQLLRRLDSDPLVNPGHANVTPDQIAHQLIQNGKTNCSRIKMKINRVPELETHQLSSPLNLKELREAIKRCKTGKAPGLDDLMMEQIKHLGPKAENWLLKFYNQCLAHKQIPRAWRKTKIIAILKPGKDASNARNYRPISLLCHLYKVYERMLLNRLGPVIEPKLIAQQAGFRPGKNCTGQILHLTEHIEEGYEKGCITGTVFVDLTAAYDTVQHRKMLHKVYHITRDFDFTKTVQTLLENRSFYVEFQGQKSRWRRQKNGLPQGSVLAPTLFNIFTNDQPQPPLTKSFIYADDLGLTTQAKDFETVEKQLTNALKDLSSYYKENHLKPNPAKTQVCAFHLRNREANRKLKVTWEGQELEHCFHPKYLGVTLDRTLTYRKHCMNTKHKVAARNNILRKLTGSAWGADPQVIRTSALALSFSTAEYACPVWHKSAHAKQVDIALNETCRIITGCLKPTPVDKLYKLAGIAPPDVRREVAANGERKKVEHCESHPLHGYHPPPTRLKSRKGFMRTTTPLDVPPAAARVSLWAAKPGNSNWMAPQEGLPPGANQEWATWKSLNRLRSGVGRSKDNLARWHYLEESSTLCDCGAEQTTQHMYACPQCPASCTEEELFKATDNAVAVARFWSKTI

SEQ ID NO: 175 - protein, 982 aa, synthetic construct
MDEYQRSLSRPLLTIMSINIEGLSLAKEELLAKMSEDISCDILCIQETHRDITMRRPKILGMQLAVERPHRQYGSAIFVRSGVAISATSLTEVNNIEILSVELDSCTVSSLYKPPGADFYFTPPTSCHNHEAHFVVGDFNSHSCVWGYDEDDRNGEAVLTWADNSRMSLLHDSKLPPSFNSGRWKRGYNPDLIFVKESISHQCTKRVLNPIPNTQHRPICCVAYAAVRPKSVPFRRRFNFNKANWTKFTETLEAAISDIEPSIENYDLFVEAVKRSSRLSIPRGCRTSYLPGLNEESLNQLQEYLRLFQENPYSDGTIAAGQKLSTALANAKKDRWIELLENLDMSKSSRKAWQLLRRLDSDPLVNPGHANVTPDQIAHQLIQNGKTNCSRIKMKINRVPELETHQLSSPLNLKELREAIKRCKTGKAPGLDDLMMEQIKHLGPKAENWLLKFYNQCLAHKQIPRAWRKTKIIAILKPGKDASNARNYRPISLLCHLYKVYERMLLNRLGPVIEPKLIAQQAGFRPGKNCTGQILHLTEHIEEGYEKGCITGTVFVDLTAAYDTVQHRKMLHKVYHITRDFDFTKTVQTLLENRSFYVEFQGQKSRWRKQKNGLPQGSVLAPTLFNIFTNDQPQPPLTKSFIYADDLGLTTQAKDFETVEKQLTNALKDLSSYYKENHLKPNPAKTQVCAFHLRNREANRKLKVTWEGQELEHCFHPKYLGVTLDRTLTYRKHCMNTKHKVAARNNILRKLTGSAWGADPQVIRTSALALSFSTAEYACPVWHKSAHAKQVDIALNETCRIITGCLKPTPVDKLYKLAGIAPPDVRREVAANGERKKVEHCESHPLHGYHPPPTRLKSRKGFMRTTTPLDVPPAAARVSLWAAKPGNSNWMAPQEGLPPGANQEWATWKSLNRLRSGVGRSKDNLARWHYLEESSTLCDCGAEQTTQHMYACPQCPASCTEEELFKATDNAVAVARFWSKTI

SEQ ID NO: 176 - protein, 982 aa, synthetic construct
MDEYQRSLSRPLLTIMSINIEGLSLAKEELLAKMSEDISCDILCIQETHRDITMRRPKILGMQLAVERPHRQYGSAIFVRSGVAISATSLTEVNNIEILSVELDSCTVSSLYKPPGADFYFTPPTSCHNHEAHFVVGDFNSHSCVWGYDEDDRNGEAVLTWADNSRMSLLHDSKLPPSFNSGRWKRGYNPDLIFVKESISHQCTKRVLNPIPNTQHRPICCVAYAAVRPKSVPFRRRFNFNKANWTKFTETLEAAISDIEPSIENYDLFVEAVKRSSRLSIPRGCRTSYLPGLNEESLNQLQEYLRLFQENPYSDGTIAAGQKLSTALANAKKDRWIELLENLDMSKSSRKAWQLLRRLDSDPLVNPGHANVTPDQIAHQLIQNGKTNCSRIKMKINRVPELETHQLSSPLNLKELREAIKRCKTGKAPGLDDLMMEQIKHLGPKAENWLLKFYNQCLAHKQIPRAWRKTKIIAILKPGKDASNARNYRPISLLCHLYKVYERMLLNRLGPVIEPKLIAQQAGFRPGKNCTGQILHLTEHIEEGYEKGCITGTVFVDLTAAYDTVQHRKMLHKVYHITRDFDFTKTVQTLLENRSFYVEFQGQKSRWRRQTNGLPQGSVLAPTLFNIFTNDQPQPPLTKSFIYADDLGLTTQAKDFETVEKQLTNALKDLSSYYKENHLKPNPAKTQVCAFHLRNREANRKLKVTWEGQELEHCFHPKYLGVTLDRTLTYRKHCMNTKHKVAARNNILRKLTGSAWGADPQVIRTSALALSFSTAEYACPVWHKSAHAKQVDIALNETCRIITGCLKPTPVDKLYKLAGIAPPDVRREVAANGERKKVEHCESHPLHGYHPPPTRLKSRKGFMRTTTPLDVPPAAARVSLWAAKPGNSNWMAPQEGLPPGANQEWATWKSLNRLRSGVGRSKDNLARWHYLEESSTLCDCGAEQTTQHMYACPQCPASCTEEELFKATDNAVAVARFWSKTI

SEQ ID NO: 177 - protein, 982 aa, synthetic construct
MDEYQRSLSRPLLTIMSINIEGLSLAKEELLAKMSEDISCDILCIQETHRDITMRRPKILGMQLAVERPHRQYGSAIFVRSGVAISATSLTEVNNIEILSVELDSCTVSSLYKPPGADFYFTPPTSCHNHEAHFVVGDFNSHSCVWGYDEDDRNGEAVLTWADNSRMSLLHDSKLPPSFNSGRWKRGYNPDLIFVKESISHQCTKRVLNPIPNTQHRPICCVAYAAVRPKSVPFRRRFNFNKANWTKFTETLEAAISDIEPSIENYDLFVEAVKRSSRLSIPRGCRTSYLPGLNEESLNQLQEYLRLFQENPYSDGTIAAGQKLSTALANAKKDRWIELLENLDMSKSSRKAWQLLRRLDSDPLVNPGHANVTPDQIAHQLIQNGKTNCSRIKMKINRVPELETHQLSSPLNLKELREAIKRCKTGKAPGLDDLMMEQIKHLGPKAENWLLKFYNQCLAHKQIPRAWRKTKIIAILKPGKDASNARNYRPISLLCHLYKVYERMLLNRLGPVIEPKLIAQQAGFRPGKNCTGQILHLTEHIEEGYEKGCITGTVFVDLTAAYDTVQHRKMLHKVYHITRDFDFTKTVQTLLENRSFYVEFQGQKSRWRRQKNGLPQGSVLAPTLFNIFTNDQPQPPLTKSFIYADDLGLTTQAKDFETVEKQLTKALKDLSSYYKENHLKPNPAKTQVCAFHLRNREANRKLKVTWEGQELEHCFHPKYLGVTLDRTLTYRKHCMNTKHKVAARNNILRKLTGSAWGADPQVIRTSALALSFSTAEYACPVWHKSAHAKQVDIALNETCRIITGCLKPTPVDKLYKLAGIAPPDVRREVAANGERKKVEHCESHPLHGYHPPPTRLKSRKGFMRTTTPLDVPPAAARVSLWAAKPGNSNWMAPQEGLPPGANQEWATWKSLNRLRSGVGRSKDNLARWHYLEESSTLCDCGAEQTTQHMYACPQCPASCTEEELFKATDNAVAVARFWSKTI

SEQ ID NO: 178 - protein, 982 aa, synthetic construct
MDEYQRSLSRPLLTIMSINIEGLSLAKEELLAKMSEDISCDILCIQETHRDITMRRPKILGMQLAVERPHRQYGSAIFVRSGVAISATSLTEVNNIEILSVELDSCTVSSLYKPPGADFYFTPPTSCHNHEAHFVVGDFNSHSCVWGYDEDDRNGEAVLTWADNSRMSLLHDSKLPPSFNSGRWKRGYNPDLIFVKESISHQCTKRVLNPIPNTQHRPICCVAYAAVRPKSVPFRRRFNFNKANWTKFTETLEAAISDIEPSIENYDLFVEAVKRSSRLSIPRGCRTSYLPGLNEESLNQLQEYLRLFQENPYSDGTIAAGQKLSTALANAKKDRWIELLENLDMSKSSRKAWQLLRRLDSDPLVNPGHANVTPDQIAHQLIQNGKTNCSRIKMKINRVPELETHQLSSPLNLKELREAIKRCKTGKAPGLDDLMMEQIKHLGPKAENWLLKFYNQCLAHKQIPRAWRKTKIIAILKPGKDASNARNYRPISLLCHLYKVYERMLLNRLGPVIEPKLIAQQAGFRPGKNCTGQILHLTEHIEEGYEKGCITGTVFVDLTAAYDTVQHRKMLHKVYHITRDFDFTKTVQTLLENRSFYVEFQGQKSRWRRQKNGLPQGSVLAPTLFNIFTNDQPQPPLTKSFIYADDLGLTTQAKDFETVEKQLTNALKDLSSYYKENHLKPNPAKTQVCAFHLRRREANRKLKVTWEGQELEHCFHPKYLGVTLDRTLTYRKHCMNTKHKVAARNNILRKLTGSAWGADPQVIRTSALALSFSTAEYACPVWHKSAHAKQVDIALNETCRIITGCLKPTPVDKLYKLAGIAPPDVRREVAANGERKKVEHCESHPLHGYHPPPTRLKSRKGFMRTTTPLDVPPAAARVSLWAAKPGNSNWMAPQEGLPPGANQEWATWKSLNRLRSGVGRSKDNLARWHYLEESSTLCDCGAEQTTQHMYACPQCPASCTEEELFKATDNAVAVARFWSKTI

SEQ ID NO: 179 - protein, 982 aa, synthetic construct
MDEYQRSLSRPLLTIMSINIEGLSLAKEELLAKMSEDISCDILCIQETHRDITMRRPKILGMQLAVERPHRQYGSAIFVRSGVAISATSLTEVNNIEILSVELDSCTVSSLYKPPGADFYFTPPTSCHNHEAHFVVGDFNSHSCVWGYDEDDRNGEAVLTWADNSRMSLLHDSKLPPSFNSGRWKRGYNPDLIFVKESISHQCTKRVLNPIPNTQHRPICCVAYAAVRPKSVPFRRRFNFNKANWTKFTETLEAAISDIEPSIENYDLFVEAVKRSSRLSIPRGCRTSYLPGLNEESLNQLQEYLRLFQENPYSDGTIAAGQKLSTALANAKKDRWIELLENLDMSKSSRKAWQLLRRLDSDPLVNPGHANVTPDQIAHQLIQNGKTNCSRIKMKINRVPELETHQLSSPLNLKELREAIKRCKTGKAPGLDDLMMEQIKHLGPKAENWLLKFYNQCLAHKQIPRAWRKTKIIAILKPGKDASNARNYRPISLLCHLYKVYERMLLNRLGPVIEPKLIAQQAGFRPGKNCTGQILHLTEHIEEGYEKGCITGTVFVDLTAAYDTVQHRKMLHKVYHITRDFDFTKTVQTLLENRSFYVEFQGQKSRWRRQKNGLPQGSVLAPTLFNIFTNDQPQPPLTKSFIYADDLGLTTQAKDFETVEKQLTNALKDLSSYYKENHLKPNPAKTQVCAFHLRNHEANRKLKVTWEGQELEHCFHPKYLGVTLDRTLTYRKHCMNTKHKVAARNNILRKLTGSAWGADPQVIRTSALALSFSTAEYACPVWHKSAHAKQVDIALNETCRIITGCLKPTPVDKLYKLAGIAPPDVRREVAANGERKKVEHCESHPLHGYHPPPTRLKSRKGFMRTTTPLDVPPAAARVSLWAAKPGNSNWMAPQEGLPPGANQEWATWKSLNRLRSGVGRSKDNLARWHYLEESSTLCDCGAEQTTQHMYACPQCPASCTEEELFKATDNAVAVARFWSKTI

SEQ ID NO: 180 - protein, 982 aa, synthetic construct
MDEYQRSLSRPLLTIMSINIEGLSLAKEELLAKMSEDISCDILCIQETHRDITMRRPKILGMQLAVERPHRQYGSAIFVRSGVAISATSLTEVNNIEILSVELDSCTVSSLYKPPGADFYFTPPTSCHNHEAHFVVGDFNSHSCVWGYDEDDRNGEAVLTWADNSRMSLLHDSKLPPSFNSGRWKRGYNPDLIFVKESISHQCTKRVLNPIPNTQHRPICCVAYAAVRPKSVPFRRRFNFNKANWTKFTETLEAAISDIEPSIENYDLFVEAVKRSSRLSIPRGCRTSYLPGLNEESLNQLQEYLRLFQENPYSDGTIAAGQKLSTALANAKKDRWIELLENLDMSKSSRKAWQLLRRLDSDPLVNPGHANVTPDQIAHQLIQNGKTNCSRIKMKINRVPELETHQLSSPLNLKELREAIKRCKTGKAPGLDDLMMEQIKHLGPKAENWLLKFYNQCLAHKQIPRAWRKTKIIAILKPGKDASNARNYRPISLLCHLYKVYERMLLNRLGPVIEPKLIAQQAGFRPGKNCTGQILHLTEHIEEGYEKGCITGTVFVDLTAAYDTVQHRKMLHKVYHITRDFDFTKTVQTLLENRSFYVEFQGQKSRWRRQKNGLPQGSVLAPTLFNIFTNDQPQPPLTKSFIYADDLGLTTQAKDFETVEKQLTNALKDLSSYYKENHLKPNPAKTQVCAFHLRNREANRKLKVTWEGQELEHCFHPKYLGVTLDRTLTYRKHCMNTKHKVTARNNILRKLTGSAWGADPQVIRTSALALSFSTAEYACPVWHKSAHAKQVDIALNETCRIITGCLKPTPVDKLYKLAGIAPPDVRREVAANGERKKVEHCESHPLHGYHPPPTRLKSRKGFMRTTTPLDVPPAAARVSLWAAKPGNSNWMAPQEGLPPGANQEWATWKSLNRLRSGVGRSKDNLARWHYLEESSTLCDCGAEQTTQHMYACPQCPASCTEEELFKATDNAVAVARFWSKTI

SEQ ID NO: 181 - protein, 982 aa, synthetic construct
MDEYQRSLSRPLLTIMSINIEGLSLAKEELLAKMSEDISCDILCIQETHRDITMRRPKILGMQLAVERPHRQYGSAIFVRSGVAISATSLTEVNNIEILSVELDSCTVSSLYKPPGADFYFTPPTSCHNHEAHFVVGDFNSHSCVWGYDEDDRNGEAVLTWADNSRMSLLHDSKLPPSFNSGRWKRGYNPDLIFVKESISHQCTKRVLNPIPNTQHRPICCVAYAAVRPKSVPFRRRFNFNKANWTKFTETLEAAISDIEPSIENYDLFVEAVKRSSRLSIPRGCRTSYLPGLNEESLNQLQEYLRLFQENPYSDGTIAAGQKLSTALANAKKDRWIELLENLDMSKSSRKAWQLLRRLDSDPLVNPGHANVTPDQIAHQLIQNGKTNCSRIKMKINRVPELETHQLSSPLNLKELREAIKRCKTGKAPGLDDLMMEQIKHLGPKAENWLLKFYNQCLAHKQIPRAWRKTKIIAILKPGKDASNARNYRPISLLCHLYKVYERMLLNRLGPVIEPKLIAQQAGFRPGKNCTGQILHLTEHIEEGYEKGCITGTVFVDLTAAYDTVQHRKMLHKVYHITRDFDFTKTVQTLLENRSFYVEFQGQKSRWRRQKNGLPQGSVLAPTLFNIFTNDQPQPPLTKSFIYADDLGLTTQAKDFETVEKQLTNALKDLSSYYKENHLKPNPAKTQVCAFHLRNREANRKLKVTWEGQELEHCFHPKYLGVTLDRTLTYRKHCMNTKHKVAARNNILRRLTGSAWGADPQVIRTSALALSFSTAEYACPVWHKSAHAKQVDIALNETCRIITGCLKPTPVDKLYKLAGIAPPDVRREVAANGERKKVEHCESHPLHGYHPPPTRLKSRKGFMRTTTPLDVPPAAARVSLWAAKPGNSNWMAPQEGLPPGANQEWATWKSLNRLRSGVGRSKDNLARWHYLEESSTLCDCGAEQTTQHMYACPQCPASCTEEELFKATDNAVAVARFWSKTI

SEQ ID NO: 182 - protein, 982 aa, synthetic construct
MDEYQRSLSRPLLTIMSINIEGLSLAKEELLAKMSEDISCDILCIQETHRDITMRRPKILGMQLAVERPHRQYGSAIFVRSGVAISATSLTEVNNIEILSVELDSCTVSSLYKPPGADFYFTPPTSCHNHEAHFVVGDFNSHSCVWGYDEDDRNGEAVLTWADNSRMSLLHDSKLPPSFNSGRWKRGYNPDLIFVKESISHQCTKRVLNPIPNTQHRPICCVAYAAVRPKSVPFRRRFNFNKANWTKFTETLEAAISDIEPSIENYDLFVEAVKRSSRLSIPRGCRTSYLPGLNEESLNQLQEYLRLFQENPYSDGTIAAGQKLSTALANAKKDRWIELLENLDMSKSSRKAWQLLRRLDSDPLVNPGHANVTPDQIAHQLIQNGKTNCSRIKMKINRVPELETHQLSSPLNLKELREAIKRCKTGKAPGLDDLMMEQIKHLGPKAENWLLKFYNQCLAHKQIPRAWRKTKIIAILKPGKDASNARNYRPISLLCHLYKVYERMLLNRLGPVIEPKLIAQQAGFRPGKNCTGQILHLTEHIEEGYEKGCITGTVFVDLTAAYDTVQHRKMLHKVYHITRDFDFTKTVQTLLENRSFYVEFQGQKSRWRRQKNGLPQGSVLAPTLFNIFTNDQPQPPLTKSFIYADDLGLTTQAKDFETVEKQLTNALKDLSSYYKENHLKPNPAKTQVCAFHLRNREANRKLKVTWEGQELEHCFHPKYLGVTLDRTLTYRKHCMNTKHKVAARNNILRKLTGSKWGADPQVIRTSALALSFSTAEYACPVWHKSAHAKQVDIALNETCRIITGCLKPTPVDKLYKLAGIAPPDVRREVAANGERKKVEHCESHPLHGYHPPPTRLKSRKGFMRTTTPLDVPPAAARVSLWAAKPGNSNWMAPQEGLPPGANQEWATWKSLNRLRSGVGRSKDNLARWHYLEESSTLCDCGAEQTTQHMYACPQCPASCTEEELFKATDNAVAVARFWSKTI

SEQ ID NO: 183 - protein, 982 aa, synthetic construct
MDEYQRSLSRPLLTIMSINIEGLSLAKEELLAKMSEDISCDILCIQETHRDITMRRPKILGMQLAVERPHRQYGSAIFVRSGVAISATSLTEVNNIEILSVELDSCTVSSLYKPPGADFYFTPPTSCHNHEAHFVVGDFNSHSCVWGYDEDDRNGEAVLTWADNSRMSLLHDSKLPPSFNSGRWKRGYNPDLIFVKESISHQCTKRVLNPIPNTQHRPICCVAYAAVRPKSVPFRRRFNFNKANWTKFTETLEAAISDIEPSIENYDLFVEAVKRSSRLSIPRGCRTSYLPGLNEESLNQLQEYLRLFQENPYSDGTIAAGQKLSTALANAKKDRWIELLENLDMSKSSRKAWQLLRRLDSDPLVNPGHANVTPDQIAHQLIQNGKTNCSRIKMKINRVPELETHQLSSPLNLKELREAIKRCKTGKAPGLDDLMMEQIKHLGPKAENWLLKFYNQCLAHKQIPRAWRKTKIIAILKPGKDASNARNYRPISLLCHLYKVYERMLLNRLGPVIEPKLIAQQAGFRPGKNCTGQILHLTEHIEEGYEKGCITGTVFVDLTAAYDTVQHRKMLHKVYHITRDFDFTKTVQTLLENRSFYVEFQGQKSRWRRQKNGLPQGSVLAPTLFNIFTNDQPQPPLTKSFIYADDLGLTTQAKDFETVEKQLTNALKDLSSYYKENHLKPNPAKTQVCAFHLRNREANRKLKVTWEGQELEHCFHPKYLGVTLDRTLTYRKHCMNTKHKVAARNNILRKLTGSAWGADPQVIRTSALALSFSTAEYACPVWHKSEHAKQVDIALNETCRIITGCLKPTPVDKLYKLAGIAPPDVRREVAANGERKKVEHCESHPLHGYHPPPTRLKSRKGFMRTTTPLDVPPAAARVSLWAAKPGNSNWMAPQEGLPPGANQEWATWKSLNRLRSGVGRSKDNLARWHYLEESSTLCDCGAEQTTQHMYACPQCPASCTEEELFKATDNAVAVARFWSKTI

SEQ ID NO: 184 - protein, 982 aa, synthetic construct
MDEYQRSLSRPLLTIMSINIEGLSLAKEELLAKMSEDISCDILCIQETHRDITMRRPKILGMQLAVERPHRQYGSAIFVRSGVAISATSLTEVNNIEILSVELDSCTVSSLYKPPGADFYFTPPTSCHNHEAHFVVGDFNSHSCVWGYDEDDRNGEAVLTWADNSRMSLLHDSKLPPSFNSGRWKRGYNPDLIFVKESISHQCTKRVLNPIPNTQHRPICCVAYAAVRPKSVPFRRRFNFNKANWTKFTETLEAAISDIEPSIENYDLFVEAVKRSSRLSIPRGCRTSYLPGLNEESLNQLQEYLRLFQENPYSDGTIAAGQKLSTALANAKKDRWIELLENLDMSKSSRKAWQLLRRLDSDPLVNPGHANVTPDQIAHQLIQNGKTNCSRIKMKINRVPELETHQLSSPLNLKELREAIKRCKTGKAPGLDDLMMEQIKHLGPKAENWLLKFYNQCLAHKQIPRAWRKTKIIAILKPGKDASNARNYRPISLLCHLYKVYERMLLNRLGPVIEPKLIAQQAGFRPGKNCTGQILHLTEHIEEGYEKGCITGTVFVDLTAAYDTVQHRKMLHKVYHITRDFDFTKTVQTLLENRSFYVEFQGQKSRWRRQKNGLPQGSVLAPTLFNIFTNDQPQPPLTKSFIYADDLGLTTQAKDFETVEKQLTNALKDLSSYYKENHLKPNPAKTQVCAFHLRNREANRKLKVTWEGQELEHCFHPKYLGVTLDRTLTYRKHCMNTKHKVAARNNILRKLTGSAWGADPQVIRTSALALSFSTAEYACPVWHKSAHAKQVDIALNETCRIITGCLRPTPVDKLYKLAGIAPPDVRREVAANGERKKVEHCESHPLHGYHPPPTRLKSRKGFMRTTTPLDVPPAAARVSLWAAKPGNSNWMAPQEGLPPGANQEWATWKSLNRLRSGVGRSKDNLARWHYLEESSTLCDCGAEQTTQHMYACPQCPASCTEEELFKATDNAVAVARFWSKTI

SEQ ID NO: 185 - protein, 982 aa, synthetic construct
MDEYQRSLSRPLLTIMSINIEGLSLAKEELLAKMSEDISCDILCIQETHRDITMRRPKILGMQLAVERPHRQYGSAIFVRSGVAISATSLTEVNNIEILSVELDSCTVSSLYKPPGADFYFTPPTSCHNHEAHFVVGDFNSHSCVWGYDEDDRNGEAVLTWADNSRMSLLHDSKLPPSFNSGRWKRGYNPDLIFVKESISHQCTKRVLNPIPNTQHRPICCVAYAAVRPKSVPFRRRFNFNKANWTKFTETLEAAISDIEPSIENYDLFVEAVKRSSRLSIPRGCRTSYLPGLNEESLNQLQEYLRLFQENPYSDGTIAAGQKLSTALANAKKDRWIELLENLDMSKSSRKAWQLLRRLDSDPLVNPGHANVTPDQIAHQLIQNGKTNCSRIKMKINRVPELETHQLSSPLNLKELREAIKRCKTGKAPGLDDLMMEQIKHLGPKAENWLLKFYNQCLAHKQIPRAWRKTKIIAILKPGKDASNARNYRPISLLCHLYKVYERMLLNRLGPVIEPKLIAQQAGFRPGKNCTGQILHLTEHIEEGYEKGCITGTVFVDLTAAYDTVQHRKMLHKVYHITRDFDFTKTVQTLLENRSFYVEFQGQKSRWRRQKNGLPQGSVLAPTLFNIFTNDQPQPPLTKSFIYADDLGLTTQAKDFETVEKQLTNALKDLSSYYKENHLKPNPAKTQVCAFHLRNREANRKLKVTWEGQELEHCFHPKYLGVTLDRTLTYRKHCMNTKHKVAARNNILRKLTGSAWGADPQVIRTSALALSFSTAEYACPVWHKSAHAKQVDIALNETCRIITGCLKTTPVDKLYKLAGIAPPDVRREVAANGERKKVEHCESHPLHGYHPPPTRLKSRKGFMRTTTPLDVPPAAARVSLWAAKPGNSNWMAPQEGLPPGANQEWATWKSLNRLRSGVGRSKDNLARWHYLEESSTLCDCGAEQTTQHMYACPQCPASCTEEELFKATDNAVAVARFWSKTI

SEQ ID NO: 186 - protein, 982 aa, synthetic construct
MDEYQRSLSRPLLTIMSINIEGLSLAKEELLAKMSEDISCDILCIQETHRDITMRRPKILGMQLAVERPHRQYGSAIFVRSGVAISATSLTEVNNIEILSVELDSCTVSSLYKPPGADFYFTPPTSCHNHEAHFVVGDFNSHSCVWGYDEDDRNGEAVLTWADNSRMSLLHDSKLPPSFNSGRWKRGYNPDLIFVKESISHQCTKRVLNPIPNTQHRPICCVAYAAVRPKSVPFRRRFNFNKANWTKFTETLEAAISDIEPSIENYDLFVEAVKRSSRLSIPRGCRTSYLPGLNEESLNQLQEYLRLFQENPYSDGTIAAGQKLSTALANAKKDRWIELLENLDMSKSSRKAWQLLRRLDSDPLVNPGHANVTPDQIAHQLIQNGKTNCSRIKMKINRVPELETHQLSSPLNLKELREAIKRCKTGKAPGLDDLMMEQIKHLGPKAENWLLKFYNQCLAHKQIPRAWRKTKIIAILKPGKDASNARNYRPISLLCHLYKVYERMLLNRLGPVIEPKLIAQQAGFRPGKNCTGQILHLTEHIEEGYEKGCITGTVFVDLTAAYDTVQHRKMLHKVYHITRDFDFTKTVQTLLENRSFYVEFQGQKSRWRRQKNGLPQGSVLAPTLFNIFTNDQPQPPLTKSFIYADDLGLTTQAKDFETVEKQLTNALKDLSSYYKENHLKPNPAKTQVCAFHLRNREANRKLKVTWEGQELEHCFHPKYLGVTLDRTLTYRKHCMNTKHKVAARNNILRKLTGSAWGADPQVIRTSALALSFSTAEYACPVWHKSAHAKQVDIALNETCRIITGCLKPTPVDKLYKLAGIAPPDVRREVAANGERKKVEHDESHPLHGYHPPPTRLKSRKGFMRTTTPLDVPPAAARVSLWAAKPGNSNWMAPQEGLPPGANQEWATWKSLNRLRSGVGRSKDNLARWHYLEESSTLCDCGAEQTTQHMYACPQCPASCTEEELFKATDNAVAVARFWSKTI

SEQ ID NO: 187 - protein, 982 aa, synthetic construct
MDEYQRSLSRPLLTIMSINIEGLSLAKEELLAKMSEDISCDILCIQETHRDITMRRPKILGMQLAVERPHRQYGSAIFVRSGVAISATSLTEVNNIEILSVELDSCTVSSLYKPPGADFYFTPPTSCHNHEAHFVVGDFNSHSCVWGYDEDDRNGEAVLTWADNSRMSLLHDSKLPPSFNSGRWKRGYNPDLIFVKESISHQCTKRVLNPIPNTQHRPICCVAYAAVRPKSVPFRRRFNFNKANWTKFTETLEAAISDIEPSIENYDLFVEAVKRSSRLSIPRGCRTSYLPGLNEESLNQLQEYLRLFQENPYSDGTIAAGQKLSTALANAKKDRWIELLENLDMSKSSRKAWQLLRRLDSDPLVNPGHANVTPDQIAHQLIQNGKTNCSRIKMKINRVPELETHQLSSPLNLKELREAIKRCKTGKAPGLDDLMMEQIKHLGPKAENWLLKFYNQCLAHKQIPRAWRKTKIIAILKPGKDASNARNYRPISLLCHLYKVYERMLLNRLGPVIEPKLIAQQAGFRPGKNCTGQILHLTEHIEEGYEKGCITGTVFVDLTAAYDTVQHRKMLHKVYHITRDFDFTKTVQTLLENRSFYVEFQGQKSRWRRQKNGLPQGSVLAPTLFNIFTNDQPQPPLTKSFIYADDLGLTTQAKDFETVEKQLTNALKDLSSYYKENHLKPNPAKTQVCAFHLRNREANRKLKVTWEGQELEHCFHPKYLGVTLDRTLTYRKHCMNTKHKVAARNNILRKLTGSAWGADPQVIRTSALALSFSTAEYACPVWHKSAHAKQVDIALNETCRIITGCLKPTPVDKLYKLAGIAPPDVRREVAANGERKKVEHCPSHPLHGYHPPPTRLKSRKGFMRTTTPLDVPPAAARVSLWAAKPGNSNWMAPQEGLPPGANQEWATWKSLNRLRSGVGRSKDNLARWHYLEESSTLCDCGAEQTTQHMYACPQCPASCTEEELFKATDNAVAVARFWSKTI

SEQ ID NO: 188 - protein, 982 aa, synthetic construct
MDEYQRSLSRPLLTIMSINIEGLSLAKEELLAKMSEDISCDILCIQETHRDITMRRPKILGMQLAVERPHRQYGSAIFVRSGVAISATSLTEVNNIEILSVELDSCTVSSLYKPPGADFYFTPPTSCHNHEAHFVVGDFNSHSCVWGYDEDDRNGEAVLTWADNSRMSLLHDSKLPPSFNSGRWKRGYNPDLIFVKESISHQCTKRVLNPIPNTQHRPICCVAYAAVRPKSVPFRRRFNFNKANWTKFTETLEAAISDIEPSIENYDLFVEAVKRSSRLSIPRGCRTSYLPGLNEESLNQLQEYLRLFQENPYSDGTIAAGQKLSTALANAKKDRWIELLENLDMSKSSRKAWQLLRRLDSDPLVNPGHANVTPDQIAHQLIQNGKTNCSRIKMKINRVPELETHQLSSPLNLKELREAIKRCKTGKAPGLDDLMMEQIKHLGPKAENWLLKFYNQCLAHKQIPRAWRKTKIIAILKPGKDASNARNYRPISLLCHLYKVYERMLLNRLGPVIEPKLIAQQAGFRPGKNCTGQILHLTEHIEEGYEKGCITGTVFVDLTAAYDTVQHRKMLHKVYHITRDFDFTKTVQTLLENRSFYVEFQGQKSRWRRQKNGLPQGSVLAPTLFNIFTNDQPQPPLTKSFIYADDLGLTTQAKDFETVEKQLTNALKDLSSYYKENHLKPNPAKTQVCAFHLRNREANRKLKVTWEGQELEHCFHPKYLGVTLDRTLTYRKHCMNTKHKVAARNNILRKLTGSAWGADPQVIRTSALALSFSTAEYACPVWHKSAHAKQVDIALNETCRIITGCLKPTPVDKLYKLAGIAPPDVRREVAANGERKKVEHCESHPLHGYHPPPQRLKSRKGFMRTTTPLDVPPAAARVSLWAAKPGNSNWMAPQEGLPPGANQEWATWKSLNRLRSGVGRSKDNLARWHYLEESSTLCDCGAEQTTQHMYACPQCPASCTEEELFKATDNAVAVARFWSKTI

SEQ ID NO: 189 - protein, 982 aa, synthetic construct
MDEYQRSLSRPLLTIMSINIEGLSLAKEELLAKMSEDISCDILCIQETHRDITMRRPKILGMQLAVERPHRQYGSAIFVRSGVAISATSLTEVNNIEILSVELDSCTVSSLYKPPGADFYFTPPTSCHNHEAHFVVGDFNSHSCVWGYDEDDRNGEAVLTWADNSRMSLLHDSKLPPSFNSGRWKRGYNPDLIFVKESISHQCTKRVLNPIPNTQHRPICCVAYAAVRPKSVPFRRRFNFNKANWTKFTETLEAAISDIEPSIENYDLFVEAVKRSSRLSIPRGCRTSYLPGLNEESLNQLQEYLRLFQENPYSDGTIAAGQKLSTALANAKKDRWIELLENLDMSKSSRKAWQLLRRLDSDPLVNPGHANVTPDQIAHQLIQNGKTNCSRIKMKINRVPELETHQLSSPLNLKELREAIKRCKTGKAPGLDDLMMEQIKHLGPKAENWLLKFYNQCLAHKQIPRAWRKTKIIAILKPGKDASNARNYRPISLLCHLYKVYERMLLNRLGPVIEPKLIAQQAGFRPGKNCTGQILHLTEHIEEGYEKGCITGTVFVDLTAAYDTVQHRKMLHKVYHITRDFDFTKTVQTLLENRSFYVEFQGQKSRWRRQKNGLPQGSVLAPTLFNIFTNDQPQPPLTKSFIYADDLGLTTQAKDFETVEKQLTNALKDLSSYYKENHLKPNPAKTQVCAFHLRNREANRKLKVTWEGQELEHCFHPKYLGVTLDRTLTYRKHCMNTKHKVAARNNILRKLTGSAWGADPQVIRTSALALSFSTAEYACPVWHKSAHAKQVDIALNETCRIITGCLKPTPVDKLYKLAGIAPPDVRREVAANGERKKVEHCESHPLHGYHPPPTRLKSRKGFMRTTRPLDVPPAAARVSLWAAKPGNSNWMAPQEGLPPGANQEWATWKSLNRLRSGVGRSKDNLARWHYLEESSTLCDCGAEQTTQHMYACPQCPASCTEEELFKATDNAVAVARFWSKTI

SEQ ID NO: 190 - protein, 982 aa, synthetic construct
MDEYQRSLSRPLLTIMSINIEGLSLAKEELLAKMSEDISCDILCIQETHRDITMRRPKILGMQLAVERPHRQYGSAIFVRSGVAISATSLTEVNNIEILSVELDSCTVSSLYKPPGADFYFTPPTSCHNHEAHFVVGDFNSHSCVWGYDEDDRNGEAVLTWADNSRMSLLHDSKLPPSFNSGRWKRGYNPDLIFVKESISHQCTKRVLNPIPNTQHRPICCVAYAAVRPKSVPFRRRFNFNKANWTKFTETLEAAISDIEPSIENYDLFVEAVKRSSRLSIPRGCRTSYLPGLNEESLNQLQEYLRLFQENPYSDGTIAAGQKLSTALANAKKDRWIELLENLDMSKSSRKAWQLLRRLDSDPLVNPGHANVTPDQIAHQLIQNGKTNCSRIKMKINRVPELETHQLSSPLNLKELREAIKRCKTGKAPGLDDLMMEQIKHLGPKAENWLLKFYNQCLAHKQIPRAWRKTKIIAILKPGKDASNARNYRPISLLCHLYKVYERMLLNRLGPVIEPKLIAQQAGFRPGKNCTGQILHLTEHIEEGYEKGCITGTVFVDLTAAYDTVQHRKMLHKVYHITRDFDFTKTVQTLLENRSFYVEFQGQKSRWRRQKNGLPQGSVLAPTLFNIFTNDQPQPPLTKSFIYADDLGLTTQAKDFETVEKQLTNALKDLSSYYKENHLKPNPAKTQVCAFHLRNREANRKLKVTWEGQELEHCFHPKYLGVTLDRTLTYRKHCMNTKHKVAARNNILRKLTGSAWGADPQVIRTSALALSFSTAEYACPVWHKSAHAKQVDIALNETCRIITGCLKPTPVDKLYKLAGIAPPDVRREVAANGERKKVEHCESHPLHGYHPPPTRLKSRKGFMRTTTPLDVPPAAARVSLWAAKPGNSNWMAPQEGLPPGANQEWATWKSLNRLRSGVGRSKDNLARWHYLEESSTLCDCGAEQTTEHMYACPQCPASCTEEELFKATDNAVAVARFWSKTI

SEQ ID NO: 191 - protein, 982 aa, synthetic construct
MDEYQRSLSRPLLTIMSINIEGLSLAKEELLAKMSEDISCDILCIQETHRDITMRRPKILGMQLAVERPHRQYGSAIFVRSGVAISATSLTEVNNIEILSVELDSCTVSSLYKPPGADFYFTPPTSCHNHEAHFVVGDFNSHSCVWGYDEDDRNGEAVLTWADNSRMSLLHDSKLPPSFNSGRWKRGYNPDLIFVKESISHQCTKRVLNPIPNTQHRPICCVAYAAVRPKSVPFRRRFNFNKANWTKFTETLEAAISDIEPSIENYDLFVEAVKRSSRLSIPRGCRTSYLPGLNEESLNQLQEYLRLFQENPYSDGTIAAGQKLSTALANAKKDRWIELLENLDMSKSSRKAWQLLRRLDSDPLVNPGHANVTPDQIAHQLIQNGKTNCSRIKMKINRVPELETHQLSSPLNLKELREAIKRCKTGKAPGLDDLMMEQIKHLGPKAENWLLKFYNQCLAHKQIPRAWRKTKIIAILKPGKDASNARNYRPISLLCHLYKVYERMLLNRLGPVIEPKLIAQQAGFRPGKNCTGQILHLTEHIEEGYEKGCITGTVFVDLTAAYDTVQHRKMLHKVYHITRDFDFTKTVQTLLENRSFYVEFQGQKSRWRRQKNGLPQGSVLAPTLFNIFTNDQPQPPLTKSFIYADDLGLTTQAKDFETVEKQLTNALKDLSSYYKENHLKPNPAKTQVCAFHLRNREANRKLKVTWEGQELEHCFHPKYLGVTLDRTLTYRKHCMNTKHKVAARNNILRKLTGSAWGADPQVIRTSALALSFSTAEYACPVWHKSAHAKQVDIALNETCRIITGCLKPTPVDKLYKLAGIAPPDVRREVAANGERKKVEHCESHPLHGYHPPPTRLKSRKGFMRTTTPLDVPPAAARVSLWAAKPGNSNWMAPQEGLPPGANQEWATWKSLNRLRSGVGRSKDNLARWHYLEESSTLCDCGAEQTTQHMYVCPQCPASCTEEELFKATDNAVAVARFWSKTI

SEQ ID NO: 192 - protein, 982 aa, synthetic construct
MDEYQRSLSRPLLTIMSINIEGLSLAKEELLAKMSEDISCDILCIQETHRDITMRRPKILGMQLAVERPHRQYGSAIFVRSGVAISATSLTEVNNIEILSVELDSCTVSSLYKPPGADFYFTPPTSCHNHEAHFVVGDFNSHSCVWGYDEDDRNGEAVLTWADNSRMSLLHDSKLPPSFNSGRWKRGYNPDLIFVKESISHQCTKRVLNPIPNTQHRPICCVAYAAVRPKSVPFRRRFNFNKANWTKFTETLEAAISDIEPSIENYDLFVEAVKRSSRLSIPRGCRTSYLPGLNEESLNQLQEYLRLFQENPYSDGTIAAGQKLSTALANAKKDRWIELLENLDMSKSSRKAWQLLRRLDSDPLVNPGHANVTPDQIAHQLIQNGKTNCSRIKMKINRVPELETHQLSSPLNLKELREAIKRCKTGKAPGLDDLMMEQIKHLGPKAENWLLKFYNQCLAHKQIPRAWRKTKIIAILKPGKDASNARNYRPISLLCHLYKVYERMLLNRLGPVIEPKLIAQQAGFRPGKNCTGQILHLTEHIEEGYEKGCITGTVFVDLTAAYDTVQHRKMLHKVYHITRDFDFTKTVQTLLENRSFYVEFQGQKSRWRRQKNGLPQGSVLAPTLFNIFTNDQPQPPLTKSFIYADDLGLTTQAKDFETVEKQLTNALKDLSSYYKENHLKPNPAKTQVCAFHLRNREANRKLKVTWEGQELEHCFHPKYLGVTLDRTLTYRKHCMNTKHKVAARNNILRKLTGSAWGADPQVIRTSALALSFSTAEYACPVWHKSAHAKQVDIALNETCRIITGCLKPTPVDKLYKLAGIAPPDVRREVAANGERKKVEHCESHPLHGYHPPPTRLKSRKGFMRTTTPLDVPPAAARVSLWAAKPGNSNWMAPQEGLPPGANQEWATWKSLNRLRSGVGRSKDNLARWHYLEESSTLCDCGAEQTTQHMYACPKCPASCTEEELFKATDNAVAVARFWSKTI

SEQ ID NO: 193 - protein, 982 aa, synthetic construct
MDEYQRSLSRPLLTIMSINIEGLSLAKEELLAKMSEDISCDILCIQETHRDITMRRPKILGMQLAVERPHRQYGSAIFVRSGVAISATSLTEVNNIEILSVELDSCTVSSLYKPPGADFYFTPPTSCHNHEAHFVVGDFNSHSCVWGYDEDDRNGEAVLTWADNSRMSLLHDSKLPPSFNSGRWKRGYNPDLIFVKESISHQCTKRVLNPIPNTQHRPICCVAYAAVRPKSVPFRRRFNFNKANWTKFTETLEAAISDIEPSIENYDLFVEAVKRSSRLSIPRGCRTSYLPGLNEESLNQLQEYLRLFQENPYSDGTIAAGQKLSTALAEAKKDRWIELLENLDMSKSSRKAWQLLRRLDSDPLVNPGHANVTPDQIAHQLIQNGKTNCSRIKMKINRVPELETHQLSSPLNLKELREAIKRCKTGKAPGLDDLMMEQIKHLGPKAENWLLKFYNQCLAHKQIPRAWRKTKIIAILKPGKDASNARNYRPISLLCHLYKVYERMLLNRLGPVIEPKLIAQQAGFRPGKNCTGQILHLTEHIEEGYEKGCITGTVFVDLTAAYDTVQHRKMLHKVYHITRDFDFTKTVQTLLENRSFYVEFQGQKSRWRRQKNGLPQGSVLAPTLFNIFTNDQPQPPLTKSFIYADDLGLTTQAKDFETVEKQLTNALKDLSSYYKENHLKPNPAKTQVCAFHLRNREANRKLKVTWEGQELEHCFHPKYLGVTLDRTLTYRKHCMNTKHKVAARNNILRKLTGSAWGADPQVIRTSALALSFSTAEYACPVWHKSAHAKQVDIALNETCRIITGCLKPTPVDKLYKLAGIAPPDVRREVAANGERKKVEHCESHPLHGYHPPPTRLKSRKGFMRTTTPLDVPPAAARVSLWAAKPGNSNWMAPQEGLPPGANQEWATWKSLNRLRSGVGRSKDNLARWHYLEESSTLCDCGAEQTTQHMYACPQCPASCTEEELFKATDNAVAVARFWSKTI

SEQ ID NO: 194 - protein, 982 aa, synthetic construct
MDEYQRSLSRPLLTIMSINIEGLSLAKEELLAKMSEDISCDILCIQETHRDITMRRPKIPGMQLAVERPHRQYGSAIFVRSGVAISATSLTEVNNIEILSVELDSCTVSSLYKPPGADFYFTPPTSCHNHEAHFVVGDFNSHSCVWGYDEDDRNGEAVLTWADNSRMSLLHDSKLPPSFNSGRWKRGYNPDLIFVKESISHQCTKRVLNPIPNTQHRPICCVAYAAVRPKSVPFRRRFNFNKANWTKFTETLEAAISDIEPSIENYDLFVEAVKRSSRLSIPRGCRTSYLPGLNEESLNQLQEYLRLFQENPYSDGTIAAGQKLSTALANAKKDRWIELLENLDMSKSSRKAWQLLRRLDSDPLVNPGHANVTPDQIAHQLIQNGKTNCSRIKMKINRVPELETHQLSSPLNLKELREAIKRCKTGKAPGLDDLMMEQIKHLGPKAENWLLKFYNQCLAHKQIPRAWRKTKIIAILKPGKDASNARNYRPISLLCHLYKVYERMLLNRLGPVIEPKLIAQQAGFRPGKNCTGQILHLTEHIEEGYEKGCITGTVFVDLTAAYDTVQHRKMLHKVYHITRDFDFTKTVQTLLENRSFYVEFQGQKSRWRRQKNGLPQGSVLAPTLFNIFTNDQPQPPLTKSFIYADDLGLTTQAKDFETVEKQLTNALKDLSSYYKENHLKPNPAKTQVCAFHLRNREANRKLKVTWEGQELEHCFHPKYLGVTLDRTLTYRKHCMNTKHKVAARNNILRKLTGSAWGADPQVIRTSALALSFSTAEYACPVWHKSAHAKQVDIALNETCRIITGCLKPTPVDKLYKLAGIAPPDVRREVAANGERKKVEHCESHPLHGYHPPPTRLKSRKGFMRTTTPLDVPPAAARVSLWAAKPGNSNWMAPQEGLPPGANQEWATWKSLNRLRSGVGRSKDNLARWHYLEESSTLCDCGAEQTTQHMYACPQCPASCTEEELFKATDNAVAVARFWSKTI

SEQ ID NO: 195 - protein, 982 aa, synthetic construct
MDEYQRSLSRPLLTIMSINIEGLSLAKEELLAKMSEDISCDILCIQETHRDITMRRPKILGMQLAVERPHRQYGSAIFVRSGVAISATSLTEVNNIEILSVELDSCTVSSLYKPPGADFYFTPPTSCHNHEAHFVVGDFNSHSCVWGYDEDDRNGEAVLTWADNSRMSLLHDSKLPPSFNSGRWKRGYNPDLIFVKESISHQCTKRVLNPIPNTQHRPICCVAYAAVRPKSVPFRRRFNFNKANWTKFTETLEAAISDIEPSIENYDLFVEAVKRSSRLSIPRGCRTSYLPGLNEESLNQLQEYLRLFQENPYSDGTIAAGQKLSTALANAKKDRWIELLENLDMSKSSRKAWQLLRRLDSDPLVNPGHANVTPDQIAHQLIQNGKTNCSRIKMKINRVPELETHQLSSPLNLKELREAIKRCKTGKAPGLDDLMMEQIKHLGPKAENWLLKFYNQCLAHKQIPRAWRKTKIIAILKPGKDASNARNYRPISLLCHLYKVYERMLLNRLGPVIEPKLIAQQAGFRPGKNCTGQILHLTEHIEEGYEKGCITGTVFVDLTAAYDTVQHRKMLHKVYHITRDFDFTKTVQTLLENRSFYVEFQGQKSRWRRQKNGLPQGSVLAPTLFNIFTNDQPQPPLTKSFIYADDLGLTTQAKDFETVEKQLTNALKDLSSYYKENHLKPNPAKTQVCAFHLRNREANRKLKVTWEGQELEHCFHPKYLGVTLDRTLTYRKHCMNTKHKVAARNNILRKLTGSAWGADPQVIRTSALALSFSTAEYACPVWHKSAHAKQVDIALNETCRIITGCLKPTPVDKLYKLAGIAPPDVRREVAANKERKKVEHCESHPLHGYHPPPTRLKSRKGFMRTTTPLDVPPAAARVSLWAAKPGNSNWMAPQEGLPPGANQEWATWKSLNRLRSGVGRSKDNLARWHYLEESSTLCDCGAEQTTQHMYACPQCPASCTEEELFKATDNAVAVARFWSKTI

SEQ ID NO: 196 - protein, 982 aa, synthetic construct
MDEYQRSLSRPLLTIMSINIEGLSLAKEELLAKMSEDISCDILCIQETHRDITMRRPKILGMQLAVERPHRQYGSAIFVRSGVAISATSLTEVNNIEILSVELDSCTVSSLYKPPGADFYFTPPTSCHNHEAHFVVGDFNSHSCVWGYDEDDRNGEAVLTWADNSRMSLLHDSKLPPSFNSGRWKRGYNPDLIFVKESISHQCTKRVLNPIPNTQHRPICCVAYAAVRPKSVPFRRRFNFNKANWTKFTETLEAAISDIEPSIENYDLFVEAVKRSSRLSIPRGCRTSYLPGLNEESLNQLQEYLRLFQENPYSDGTIAAGQKLSTALANAKKDRWIELLENLDMSKSSRKAWQLLRRLDSDPLVNPGHANVTPDQIAHQLIQNGKTNCSRIKMKINRVPELETHQLSSPLNLKELREAIKRCKTGKAPGLDDLMMEQIKHLGPKAENWLLKFYNQCLAHKQIPRAWRKTKIIAILKPGKDASNARNYRPISLLCHLYKVYERMLLNRLGPVIEPKLIAQQAGFRPGKNCTGQILHLTEHIEEGYEKGCITGTVFVDLTAAYDTVQHRKMLHKVYHITRDFDFTKTVQTLLENRSFYVEFQGQKSRWRRQKNGLPQGSVLAPTLFNIFTNDQPQPPLTKSFIYADDLGLTTQAKDFETVEKQLTNALKDLSSYYKENHLKPNPAKTQVCAFHLRNREANRKLKVTWEGQELEHCFHPKYLGVTLDRTLTYRKHCMNTKHKVAARNNILRKLTGSAWGADPQVIRTSALALSFSTAEYACPVWHKSAHAKQVDIALNETCRIITGCLKPTPVDKLYKLAGIAPPDVRREVAANGERKKVEHCESHPLHGYHPPPTRLKSRKSFMRTTTPLDVPPAAARVSLWAAKPGNSNWMAPQEGLPPGANQEWATWKSLNRLRSGVGRSKDNLARWHYLEESSTLCDCGAEQTTQHMYACPQCPASCTEEELFKATDNAVAVARFWSKTI

SEQ ID NO: 197 - protein, 982 aa, synthetic construct
MDEYQRSLSRPLLTIMSINIEGLSLAKEELLAKMSEDISCDILCIQETHRDITMRRPKILGMQLAVERPHRQYGSAIFVRSGVAISATSLTEVNNIEILSVELDSCTVSSLYKPPGADFYFTPPTSCHNHEAHFVVGDFNSHSCVWGYDEDDRNGEAVLTWADNSRMSLLHDSKLPPSFNSGRWKRGYNPDLIFVKESISHQCTKRVLNPIPNTQHRPICCVAYAAVRPKSVPFRRRFNFNKANWTKFTETLEAAISDIEPSIENYDLFVEAVKRSSRLSIPRGCRTSYLPGLNEESLNQLQEYLRLFQENPYSDGTIAAGQKLSTALANAKKDRWIELLENLDMSKSSRKAWQLLRRLDSDPLVNPGHANVTPDQIAHQLIQNGKTNCSRIKMKINRVPELETHQLSSPLNLKELREAIKRCKTGKAPGLDDLMMEQIKHLGPKAENWLLKFYNQCLAHKQIPRAWRKTKIIAILKPGKDASNARNYRPISLLCHLYKVYERMLLNRLGPVIEPKLIAQQAGFRPGKNCTGQILHLTEHIEEGYEKGCITGTVFVDLTAAYDTVQHRKMLHKVYHITRDFDFTKTVQTLLENRSFYVEFQGQKSRWRRQKNGLPQGSVLAPTLFNIFTNDQPQPPLTKSFIYADDLGLTTQAKDFETVEKQLTNALKDLSSYYKENHLKPNPAKTQVCAFHLRNREANRKLKVTWEGQELEHCFHPKYLGVTLDRTLTYRKHCMNTKHKVAARNNILRKLTGSAWGADPQVIRTSALALSFSTAEYACPVWHKSAHAKQVDIALNETCRIITGCLKPTPVDKLYKLAGIAPPDVRREVAANGERKKVEHCESHPLHGYHPPPTRLKSRKGFMRTTTPLDVPPAAARVSLWAAKPGNSNWMAPQEGLPPGANQEWATWKSLNRLRSGVGRSKDNLARWHYLEESSTLCDCGAEQTTQHMVACPQCPASCTEEELFKATDNAVAVARFWSKTI

SEQ ID NO: 198 - protein, 982 aa, synthetic construct
MDEYQRSLSRPLLTIMSINIEGLSLAKEELLAKMSEDISCDILCIQETHRDITMRRPKILGMQLAVERPHRQYGSAIFVRSGVAISATSLTEVNNIEILSVELDSCTVSSLYKPPGADFYFTPPTSCHNHEAHFVVGDFNSHSCVWGYDEDDRNGEAVLTWADNSRMSLLHDSKLPPSFNSGRWKRGYNPDLIFVKESISHQCTKRVLNPIPNTQHRPICCVAYAAVRPKSVPFRRRFNFNKANWTKFTETLEAAISDIEPSIENYDLFVEAVKRSSRLSIPRGCRTSYLPGLNEESLNQLQEYLRLFQENPYSDGTIAAGQKLSTALANAKKDRWIELLENLDMSKSSRKAWQLLRRLDSDPLVNPGHANVTPDQIAHQLIQNGKTNCSRIKMKINRVPELETHQLSSPLNLKELREAIKRCKTGKAPGLDDLMMEQIKHLGPKAENWLLKFYNQCLAHKQIPRAWRKTKIIAILKPGKDASNARNYRPISLLCHLYKVYERMLLNRLGPVIEPKLIAQQAGFRPGKNCTGQILHLTEHIEEGYEKGCITGTVFVDLTAAYDTVQHRKMLHKVYHITRDFDFTKTVQTLLENRSFYVEFQGQKSRWRRQKNGLPQGSVLAPTLFNIFTNDQPQPPLTKSFIYADDLGLTTQAKDFETVEKQLTNALKDLSSYYKENHLKPNPAKTQVCAFHLRNREANRKLKVTWEGQELEHCFHPKYLGVTLDRTLTYRKHCMNTKHKVAARNNILRKLTGSAWGADPQVIRTSALALSFSTAEYACPVWHKSAHAKQVDIALNETCRIITGCLKPTPVDKLYKLAGIAPPDVRREVAANLERKKVEHCESHPLHGYHPPPTRLKSRKGFMRTTTPLDVPPAAARVSLWAAKPGNSNWMAPQEGLPPGANQEWATWKSLNRLRSGVGRSKDNLARWHYLEESSTLCDCGAEQTTQHMYACPQCPASCTEEELFKATDNAVAVARFWSKTI

SEQ ID NO: 199 - protein, 982 aa, synthetic construct
MDEYQRSLSRPLLTIMSINIEGLSLAKEELLAKMSEDISCDILCIQETHRDITMRRPKILGMQLAVERPHRQYGSAIFVRSGVAISATSLTEVNNIEILSVELDSCTVSSLYKPPGADFYFTPPTSCHNHEAHFVVGDFNSHSCVWGYDEDDRNGEAVLTWADNSRMSLLHDSKLPPSFNSGRWKRGYNPDLIFVKESISHQCTKRVLNPIPNTQHRPICCVAYATVRPKSVPFRRRFNFNKANWTKFTETLEAAISDIEPSIENYDLFVEAVKRSSRLSIPRGCRTSYLPGLNEESLNQLQEYLRLFQENPYSDGTIAAGQKLSTALANAKKDRWIELLENLDMSKSSRKAWQLLRRLDSDPLVNPGHANVTPDQIAHQLIQNGKTNCSRIKMKINRVPELETHQLSSPLNLKELREAIKRCKTGKAPGLDDLMMEQIKHLGPKAENWLLKFYNQCLAHKQIPRAWRKTKIIAILKPGKDASNARNYRPISLLCHLYKVYERMLLNRLGPVIEPKLIAQQAGFRPGKNCTGQILHLTEHIEEGYEKGCITGTVFVDLTAAYDTVQHRKMLHKVYHITRDFDFTKTVQTLLENRSFYVEFQGQKSRWRRQKNGLPQGSVLAPTLFNIFTNDQPQPPLTKSFIYADDLGLTTQAKDFETVEKQLTNALKDLSSYYKENHLKPNPAKTQVCAFHLRNREANRKLKVTWEGQELEHCFHPKYLGVTLDRTLTYRKHCMNTKHKVAARNNILRKLTGSAWGADPQVIRTSALALSFSTAEYACPVWHKSAHAKQVDIALNETCRIITGCLKPTPVDKLYKLAGIAPPDVRREVAANGERKKVEHCESHPLHGYHPPPTRLKSRKGFMRTTTPLDVPPAAARVSLWAAKPGNSNWMAPQEGLPPGANQEWATWKSLNRLRSGVGRSKDNLARWHYLEESSTLCDCGAEQTTQHMYACPQCPASCTEEELFKATDNAVAVARFWSKTI

SEQ ID NO: 200 - protein, 982 aa, synthetic construct
MDEYQRSLSRPLLTIMSINIEGLSLAKEELLAKMSEDISCDILCIQETHRDITMRRPKILGMQLAVERPHRQYGSAIFVRSGVAISATSLTEVNNIEILSVELDSCTVSSLYKPPGADFYFTPPTSCHNHEAHFVVGDFNSHSCVWGYDEDDRNGEAVLTWADNSRMSLLHDSKLPPSFNSGRWKRGYNPDLIFVKESISHQCTKRVLNPIPNTQHRPICCVAYAAVRPKSVPFRRRFNFNKANWTKFTETLEAAISDIEPSIENYDLFVEAVKRSSRLSIPRGCRTSYLPGLNEESLNQLQEYLRLFQENPYSDGTIAAGQKLSTALANAKKDRWIELLENLDMSKSSRKAWQLLRRLDSDPLVNPGHANVTPDQIAHQLIQNGKTNCSRIKMKINRVPELETHQLSSPLNLKELREAIKRCKTGKAPGLDDLMMEQIKHLGPKAENWLLKFYNQCLAHKQIPRAWRKTKIIAILKPGKDASNARNYRPISLLCHLYKVYERMLLNRLGPVIEPKLIAQQAGFRPGKNCTGQILHLTEHIEEGYEKGCITGTVFVDLTAAYDTVQHRKMLHKVYHITRDFDFTKTVQTLLENRSFYVEFQGQRSRWRRQKNGLPQGSVLAPTLFNIFTNDQPQPPLTKSFIYADDLGLTTQAKDFETVEKQLTNALKDLSSYYKENHLKPNPAKTQVCAFHLRNREANRKLKVTWEGQELEHCFHPKYLGVTLDRTLTYRKHCMNTKHKVAARNNILRKLTGSAWGADPQVIRTSALALSFSTAEYACPVWHKSAHAKQVDIALNETCRIITGCLKPTPVDKLYKLAGIAPPDVRREVAANGERKKVEHCESHPLHGYHPPPTRLKSRKGFMRTTTPLDVPPAAARVSLWAAKPGNSNWMAPQEGLPPGANQEWATWKSLNRLRSGVGRSKDNLARWHYLEESSTLCDCGAEQTTQHMYACPQCPASCTEEELFKATDNAVAVARFWSKTI

SEQ ID NO: 201 - protein, 982 aa, synthetic construct
MDEYQRSLSRPLLTIMSINIEGLSLAKEELLAKMAEDISCDILCIQETHRDITMRRPKILGMQLAVERPHRQYGSAIFVRSGVAISATSLTEVNNIEILSVELDSCTVSSLYKPPGADFYFTPPTSCHNHEAHFVVGDFNSHSCVWGYDEDDRNGEAVLTWADNSRMSLLHDSKLPPSFNSGRWKRGYNPDLIFVKESISHQCTKRVLNPIPNTQHRPICCVAYAAVRPKSVPFRRRFNFNKANWTKFTETLEAAISDIEPSIENYDLFVEAVKRSSRLSIPRGCRTSYLPGLNEESLNQLQEYLRLFQENPYSDGTIAAGQKLSTALANAKKDRWIELLENLDMSKSSRKAWQLLRRLDSDPLVNPGHANVTPDQIAHQLIQNGKTNCSRIKMKINRVPELETHQLSSPLNLKELREAIKRCKTGKAPGLDDLMMEQIKHLGPKAENWLLKFYNQCLAHKQIPRAWRKTKIIAILKPGKDASNARNYRPISLLCHLYKVYERMLLNRLGPVIEPKLIAQQAGFRPGKNCTGQILHLTEHIEEGYEKGCITGTVFVDLTAAYDTVQHRKMLHKVYHITRDFDFTKTVQTLLENRSFYVEFQGQKSRWRRQKNGLPQGSVLAPTLFNIFTNDQPQPPLTKSFIYADDLGLTTQAKDFETVEKQLTNALKDLSSYYKENHLKPNPAKTQVCAFHLRNREANRKLKVTWEGQELEHCFHPKYLGVTLDRTLTYRKHCMNTKHKVAARNNILRKLTGSAWGADPQVIRTSALALSFSTAEYACPVWHKSAHAKQVDIALNETCRIITGCLKPTPVDKLYKLAGIAPPDVRREVAANGERKKVEHCESHPLHGYHPPPTRLKSRKGFMRTTTPLDVPPAAARVSLWAAKPGNSNWMAPQEGLPPGANQEWATWKSLNRLRSGVGRSKDNLARWHYLEESSTLCDCGAEQTTQHMYACPQCPASCTEEELFKATDNAVAVARFWSKTI

SEQ ID NO: 202 - protein, 982 aa, synthetic construct
MDEYQRSLSRPLLTIMSINIEGLSLAKEELLAKMSEDISCDILCIQETHRDITMRRPKILGMQLAVERPHRQYGSAIFVRSGVAISATSLTEVNNIEILSVELDSCTVSSLYKPPGADFYFTPPTSCHNHEAHFVVGDFNSHSTVWGYDEDDRNGEAVLTWADNSRMSLLHDSKLPPSFNSGRWKRGYNPDLIFVKESISHQCTKRVLNPIPNTQHRPICCVAYAAVRPKSVPFRRRFNFNKANWTKFTETLEAAISDIEPSIENYDLFVEAVKRSSRLSIPRGCRTSYLPGLNEESLNQLQEYLRLFQENPYSDGTIAAGQKLSTALANAKKDRWIELLENLDMSKSSRKAWQLLRRLDSDPLVNPGHANVTPDQIAHQLIQNGKTNCSRIKMKINRVPELETHQLSSPLNLKELREAIKRCKTGKAPGLDDLMMEQIKHLGPKAENWLLKFYNQCLAHKQIPRAWRKTKIIAILKPGKDASNARNYRPISLLCHLYKVYERMLLNRLGPVIEPKLIAQQAGFRPGKNCTGQILHLTEHIEEGYEKGCITGTVFVDLTAAYDTVQHRKMLHKVYHITRDFDFTKTVQTLLENRSFYVEFQGQKSRWRRQKNGLPQGSVLAPTLFNIFTNDQPQPPLTKSFIYADDLGLTTQAKDFETVEKQLTNALKDLSSYYKENHLKPNPAKTQVCAFHLRNREANRKLKVTWEGQELEHCFHPKYLGVTLDRTLTYRKHCMNTKHKVAARNNILRKLTGSAWGADPQVIRTSALALSFSTAEYACPVWHKSAHAKQVDIALNETCRIITGCLKPTPVDKLYKLAGIAPPDVRREVAANGERKKVEHCESHPLHGYHPPPTRLKSRKGFMRTTTPLDVPPAAARVSLWAAKPGNSNWMAPQEGLPPGANQEWATWKSLNRLRSGVGRSKDNLARWHYLEESSTLCDCGAEQTTQHMYACPQCPASCTEEELFKATDNAVAVARFWSKTI

SEQ ID NO: 203 - protein, 982 aa, synthetic construct
MDEYQRSLSRPLLTIMSINIEGLSLAKEELLAKMSEDISCDILCIQETHRDITMRRPKILGMQLAVERPHRQYGSAIFVRSGVAISATSLTEVNNIEILSVELDSCTVSSLYKPPGADFYFTPPTSCHNHEAHFVVGDFNSHSCVWGYDEDDRNGEAVLTWADNSRMSLLHDSKLPPSFNSGRWKRGYNPDLIFVKESISHQCTKRVLNPIPNTQHRPICCVAYAAVRPKSVPFRRRFNFNKANWTKFTETLEAAISDIEPSIENYDLFVEAVKRSSRLSIPRGCRTSYLPGLNEESLNQLQEYLRLFQENPYSDETIAAGQKLSTALANAKKDRWIELLENLDMSKSSRKAWQLLRRLDSDPLVNPGHANVTPDQIAHQLIQNGKTNCSRIKMKINRVPELETHQLSSPLNLKELREAIKRCKTGKAPGLDDLMMEQIKHLGPKAENWLLKFYNQCLAHKQIPRAWRKTKIIAILKPGKDASNARNYRPISLLCHLYKVYERMLLNRLGPVIEPKLIAQQAGFRPGKNCTGQILHLTEHIEEGYEKGCITGTVFVDLTAAYDTVQHRKMLHKVYHITRDFDFTKTVQTLLENRSFYVEFQGQKSRWRRQKNGLPQGSVLAPTLFNIFTNDQPQPPLTKSFIYADDLGLTTQAKDFETVEKQLTNALKDLSSYYKENHLKPNPAKTQVCAFHLRNREANRKLKVTWEGQELEHCFHPKYLGVTLDRTLTYRKHCMNTKHKVAARNNILRKLTGSAWGADPQVIRTSALALSFSTAEYACPVWHKSAHAKQVDIALNETCRIITGCLKPTPVDKLYKLAGIAPPDVRREVAANGERKKVEHCESHPLHGYHPPPTRLKSRKGFMRTTTPLDVPPAAARVSLWAAKPGNSNWMAPQEGLPPGANQEWATWKSLNRLRSGVGRSKDNLARWHYLEESSTLCDCGAEQTTQHMYACPQCPASCTEEELFKATDNAVAVARFWSKTI

SEQ ID NO: 204 - protein, 982 aa, synthetic construct
MDEYQRSLSRPLLTIMSINIEGLSLAKEELLAKMSEDISCDILCIQETHRDITMRRPKILGMQLAVERPHRQYGSAIFVRSGVAISATSLTEVNNIEILSVELDSCTVSSLYKPPGADFYFTPPTSCHNHEAHFVVGDFNSHSCVWGYDEDDRNGEAVLTWADNSRMSLLHDSKLPPSFNSGRWKRGYNPDLIFVKESISHQCTKRVLNPIPNTQHRPICCVAYAAVRPKSVPFRRRFNFNKANWTKFTETLEAAISDIEPSIENYDLFVEAVKRSSRLSIPRGCRTSYLPGLNEESLNQLQEYLRLFQENPYSDGTIAAGQKLSTALAKAKKDRWIELLENLDMSKSSRKAWQLLRRLDSDPLVNPGHANVTPDQIAHQLIQNGKTNCSRIKMKINRVPELETHQLSSPLNLKELREAIKRCKTGKAPGLDDLMMEQIKHLGPKAENWLLKFYNQCLAHKQIPRAWRKTKIIAILKPGKDASNARNYRPISLLCHLYKVYERMLLNRLGPVIEPKLIAQQAGFRPGKNCTGQILHLTEHIEEGYEKGCITGTVFVDLTAAYDTVQHRKMLHKVYHITRDFDFTKTVQTLLENRSFYVEFQGQKSRWRRQKNGLPQGSVLAPTLFNIFTNDQPQPPLTKSFIYADDLGLTTQAKDFETVEKQLTNALKDLSSYYKENHLKPNPAKTQVCAFHLRNREANRKLKVTWEGQELEHCFHPKYLGVTLDRTLTYRKHCMNTKHKVAARNNILRKLTGSAWGADPQVIRTSALALSFSTAEYACPVWHKSAHAKQVDIALNETCRIITGCLKPTPVDKLYKLAGIAPPDVRREVAANGERKKVEHCESHPLHGYHPPPTRLKSRKGFMRTTTPLDVPPAAARVSLWAAKPGNSNWMAPQEGLPPGANQEWATWKSLNRLRSGVGRSKDNLARWHYLEESSTLCDCGAEQTTQHMYACPQCPASCTEEELFKATDNAVAVARFWSKTI

SEQ ID NO: 205 - protein, 982 aa, synthetic construct
MDEYQRSLSRPLLTIMSINIEGLSLAKEELLAKMSEDISCDILCIQETHRDITMRRPKILGMQLAVERPHRQYGSAIFVRSGVAISATSLTEVNNIEILSVELDSCTVSSLYKPPGADFYFTPPTSCHNHEAHFVVGDFNSHSCVWGYDEDDRNGEAVLTWADNSRMSLLHDSKLPPSFNSGRWKRGYNPDLIFVKESISHQCTKRVLNPIPNTQHRPICCVAYAAVRPKSVPFRRRFNFNKANWTKFTETLEAAISDIEPSIENYDLFVEAVKRSSRLSIPRGCRTSYLPGLNEESLNQLQEYLRLFQENPYSDGTIAAGQKLSTALANAKKDRWIELLENLDMSKSSRKAWQLLRRLASDPLVNPGHANVTPDQIAHQLIQNGKTNCSRIKMKINRVPELETHQLSSPLNLKELREAIKRCKTGKAPGLDDLMMEQIKHLGPKAENWLLKFYNQCLAHKQIPRAWRKTKIIAILKPGKDASNARNYRPISLLCHLYKVYERMLLNRLGPVIEPKLIAQQAGFRPGKNCTGQILHLTEHIEEGYEKGCITGTVFVDLTAAYDTVQHRKMLHKVYHITRDFDFTKTVQTLLENRSFYVEFQGQKSRWRRQKNGLPQGSVLAPTLFNIFTNDQPQPPLTKSFIYADDLGLTTQAKDFETVEKQLTNALKDLSSYYKENHLKPNPAKTQVCAFHLRNREANRKLKVTWEGQELEHCFHPKYLGVTLDRTLTYRKHCMNTKHKVAARNNILRKLTGSAWGADPQVIRTSALALSFSTAEYACPVWHKSAHAKQVDIALNETCRIITGCLKPTPVDKLYKLAGIAPPDVRREVAANGERKKVEHCESHPLHGYHPPPTRLKSRKGFMRTTTPLDVPPAAARVSLWAAKPGNSNWMAPQEGLPPGANQEWATWKSLNRLRSGVGRSKDNLARWHYLEESSTLCDCGAEQTTQHMYACPQCPASCTEEELFKATDNAVAVARFWSKTI

SEQ ID NO: 206 - protein, 982 aa, synthetic construct
MDEYQRSLSRPLLTIMSINIEGLSLAKEELLAKMSEDISCDILCIQETHRDITMRRPKILGMQLAVERPHRQYGSAIFVRSGVAISATSLTEVNNIEILSVELDSCTVSSLYKPPGADFYFTPPTSCHNHEAHFVVGDFNSHSCVWGYDEDDRNGEAVLTWADNSRLSLLHDSKLPPSFNSGRWKRGYNPDLIFVKESISHQCTKRVLNPIPNTQHRPICCVAYAAVRPKSVPFRRRFNFNKANWTKFTETLEAAISDIEPSIENYDLFVEAVKRSSRLSIPRGCRTSYLPGLNEESLNQLQEYLRLFQENPYSDGTIAAGQKLSTALANAKKDRWIELLENLDMSKSSRKAWQLLRRLDSDPLVNPGHANVTPDQIAHQLIQNGKTNCSRIKMKINRVPELETHQLSSPLNLKELREAIKRCKTGKAPGLDDLMMEQIKHLGPKAENWLLKFYNQCLAHKQIPRAWRKTKIIAILKPGKDASNARNYRPISLLCHLYKVYERMLLNRLGPVIEPKLIAQQAGFRPGKNCTGQILHLTEHIEEGYEKGCITGTVFVDLTAAYDTVQHRKMLHKVYHITRDFDFTKTVQTLLENRSFYVEFQGQKSRWRRQKNGLPQGSVLAPTLFNIFTNDQPQPPLTKSFIYADDLGLTTQAKDFETVEKQLTNALKDLSSYYKENHLKPNPAKTQVCAFHLRNREANRKLKVTWEGQELEHCFHPKYLGVTLDRTLTYRKHCMNTKHKVAARNNILRKLTGSAWGADPQVIRTSALALSFSTAEYACPVWHKSAHAKQVDIALNETCRIITGCLKPTPVDKLYKLAGIAPPDVRREVAANGERKKVEHCESHPLHGYHPPPTRLKSRKGFMRTTTPLDVPPAAARVSLWAAKPGNSNWMAPQEGLPPGANQEWATWKSLNRLRSGVGRSKDNLARWHYLEESSTLCDCGAEQTTQHMYACPQCPASCTEEELFKATDNAVAVARFWSKTI

SEQ ID NO: 207 - protein, 982 aa, synthetic construct
MDEYQRSLSRPLLTIMSINIEGLSLAKEELLAKMSEDISCDILCIQETHRDITMRRPKILGMQLAVERPHRQYGSAIFVRSGVAISATSLTEVNNIEILSVELDSCTVSSLYKPPGADFYFTPPTSCHNHEAHFVVGDFNSHSCVWGYDEDDRNGEAVLTWADNSRMSLLHDSKLPPSFNSGRWKRGYNPDLIFVKESISHQCTKRVLNPIPNSQHRPICCVAYAAVRPKSVPFRRRFNFNKANWTKFTETLEAAISDIEPSIENYDLFVEAVKRSSRLSIPRGCRTSYLPGLNEESLNQLQEYLRLFQENPYSDGTIAAGQKLSTALANAKKDRWIELLENLDMSKSSRKAWQLLRRLDSDPLVNPGHANVTPDQIAHQLIQNGKTNCSRIKMKINRVPELETHQLSSPLNLKELREAIKRCKTGKAPGLDDLMMEQIKHLGPKAENWLLKFYNQCLAHKQIPRAWRKTKIIAILKPGKDASNARNYRPISLLCHLYKVYERMLLNRLGPVIEPKLIAQQAGFRPGKNCTGQILHLTEHIEEGYEKGCITGTVFVDLTAAYDTVQHRKMLHKVYHITRDFDFTKTVQTLLENRSFYVEFQGQKSRWRRQKNGLPQGSVLAPTLFNIFTNDQPQPPLTKSFIYADDLGLTTQAKDFETVEKQLTNALKDLSSYYKENHLKPNPAKTQVCAFHLRNREANRKLKVTWEGQELEHCFHPKYLGVTLDRTLTYRKHCMNTKHKVAARNNILRKLTGSAWGADPQVIRTSALALSFSTAEYACPVWHKSAHAKQVDIALNETCRIITGCLKPTPVDKLYKLAGIAPPDVRREVAANGERKKVEHCESHPLHGYHPPPTRLKSRKGFMRTTTPLDVPPAAARVSLWAAKPGNSNWMAPQEGLPPGANQEWATWKSLNRLRSGVGRSKDNLARWHYLEESSTLCDCGAEQTTQHMYACPQCPASCTEEELFKATDNAVAVARFWSKTI

SEQ ID NO: 208 - protein, 982 aa, synthetic construct
MDEYQRSLSRPLLTIMSINIEGLSLAKEELLAKMSEDISCDILCIQETHRDITMRRPKILGMQLAVERPHRQYGSAIFVRSGVAISATSLTEVNNIEILSVELDSCTVSSLYKPPGADFYFTPPTSCHNHEAHFVVGDFNSHSCVWGYDEDDRNGEAVLTWADNSRMSLLHDSKLPPSFNSGRWKRGYNPDLIFVKESISHQCTKRVLNPIPNTQHRPICCVAYAAVRPKSVPFRRRFNFNKANWTKFTETLEAAISDIEPSIENYDLFVEAVKRSSRLSIPRGCRTSYLPGLNEESLNQLQEYLRLFQENPYSDGTIAAGQKLSTALANAKKDRWIELLENLDMSKSSRKAWQLLRRLDSDPLVNPGHANVTPDQIAHQLIQNGKTNCSRIKMKINRVPELETHQLSSPLNLKELREAIKRCKTGKAPGLDDLMMEQIKHLGPKAENWLLKFYNQCLAHKQIPRAWRKTKIIAILKPGKDASNARNYRPISLLCHLYKVYERMLLNRLGPVIEPKLIAQQAGFRPGKNCTGQILHLTEHIEEGYEKGCITGTVFVDLTAAYDTVQHRKMLHKVYHITRDFDFTKTVQTLLENRSFYVEFQGQKSRWRRQKNGLPQGSVLAPTLFNIFTNDQPQPPLTKSFIYADDLGLTTQAKDFETVEKQLTNALKDLSSYYKENHLKPNPAKTQVCAFHLRNREANRKLKVTWEGQELEHCFHPKYLGVTLDRTLTYRKHCMNTKHKVAARNNILRKLTGSAWGADPQVIRTSALALSFSTAEYACPVWHKSAHAKQVDIALNETCRIITGCLKPTPVDKLYKLAGIAPPDVRREVAANGERKKVEHCESHPLHGYHPPPTRLKSRKGFMRTTTPLDVPPAAARVSLWAAKPGNSNWMAPQEGLPPGANQEWATWKSLNRLRSGVGRSKDNLARWHYLEESSTLCDCGAEQTTQHMLACPQCPASCTEEELFKATDNAVAVARFWSKTI

SEQ ID NO: 209 - protein, 982 aa, synthetic construct
MDEYQRSLSRPLLTIMSINIEGLSLAKEELLAKMSEDISCDILCIQETHRDITMRRPKILGMQLAVERPHRQYGSAIFVRSGVAISATSLTEVNNIEILSVELDSCTVSSLYKPPGADFYFTPPTSCHNHEAHFVVGDFNSHSCVWGYDEDDRNGEAVLTWADNSRMSLLHDSKLPPSFNSGRWKRGYNPDLIFVKESISHQCTKRVLNPIPNTQHRPICCVAYAAVRPKSVPFRRRFNFNKANWTKFTETLEAAISDIEPSIENYDLFVEAVKRSSRLSIPRGCRTSYLPGLNEESLNQLQEYLRLFQENPYSDGTIAAGQKLSTALANAKKDRWIELLENLDMSKSSRKAWQLLRRLDSDPLVNPGHANVTPDQIAHQLIQNGKTNCSRIKMKINRVPELETHQLSSPLNLKELREAIKRCKTGKAPGLDDLMMEQIKHLGPKAENWLLKFYNQCLAHKQIPRAWRKTKIIAILKPGKDASNARNYRPISLLCHLYKVYERMLLNRLGPVIEPKLIAQQAGFRPGKNCTGQILHLTEHIEEGYEKGCITGTVFVDLTAAYDTVQHRKMLHKVYHITRDFDFTKTVQTLLENRSFYVEFQGQKSRWRRQKNGLPQGSVLAPTLFNIFTNDQPQPPLTKSFIYADDLGLTTQAKDFETVEKQLTNALKDLSSYYKENHLKPNPAKTQVCAFHLRNREANRKLKVTWEGQELEHCFHPKYLGVTLDRTLTYRKHCMNTKHKVAARNNILRKLTGSAWGADPQVIRTSALALSFSTAEYACPVWHKSAHAKQVDIALNETCRIITGCLKPTPVDKLYKLAGIAPPDVRREVAANGERKKQEHCESHPLHGYHPPPTRLKSRKGFMRTTTPLDVPPAAARVSLWAAKPGNSNWMAPQEGLPPGANQEWATWKSLNRLRSGVGRSKDNLARWHYLEESSTLCDCGAEQTTQHMYACPQCPASCTEEELFKATDNAVAVARFWSKTI

SEQ ID NO: 210 - protein, 982 aa, synthetic construct
MDEYQRSLSRPLLTIMSINIEGLSLAKEELLAKMSEDISCDILCIQETHRDITMRRPKILGMQLAVERPHRQYGSAIFVRSGVAISATSLTEVNNIEILSVELDSCTVSSLYKPPGADFYFTPPTSCHNHEAHFVVGDFNSHSCVWGYDEDDRNGEAVLTWADNSRMSLLHDSKLPPSFNSGRWKRGYNPDLIFVKESISHQCTKRVLNPIPNTQHRPICCVAYAAVRPKSVPFRRRFNFNKANWTKFTETLEAAISDIEPSIENYDLFVEAVKRSSRLSIPRGCRTSYLPGLNEESLNQLQEYLRLFQENPYSDGTIAAGQKLSTALANAKKDRWIELLENLDMSKSSRKAWQLLRRLDSDPLVNPGHANVTPNQIAHQLIQNGKTNCSRIKMKINRVPELETHQLSSPLNLKELREAIKRCKTGKAPGLDDLMMEQIKHLGPKAENWLLKFYNQCLAHKQIPRAWRKTKIIAILKPGKDASNARNYRPISLLCHLYKVYERMLLNRLGPVIEPKLIAQQAGFRPGKNCTGQILHLTEHIEEGYEKGCITGTVFVDLTAAYDTVQHRKMLHKVYHITRDFDFTKTVQTLLENRSFYVEFQGQKSRWRRQKNGLPQGSVLAPTLFNIFTNDQPQPPLTKSFIYADDLGLTTQAKDFETVEKQLTNALKDLSSYYKENHLKPNPAKTQVCAFHLRNREANRKLKVTWEGQELEHCFHPKYLGVTLDRTLTYRKHCMNTKHKVAARNNILRKLTGSAWGADPQVIRTSALALSFSTAEYACPVWHKSAHAKQVDIALNETCRIITGCLKPTPVDKLYKLAGIAPPDVRREVAANGERKKVEHCESHPLHGYHPPPTRLKSRKGFMRTTTPLDVPPAAARVSLWAAKPGNSNWMAPQEGLPPGANQEWATWKSLNRLRSGVGRSKDNLARWHYLEESSTLCDCGAEQTTQHMYACPQCPASCTEEELFKATDNAVAVARFWSKTI

SEQ ID NO: 211 - protein, 982 aa, synthetic construct
MDEYQRSLSRPLLTIMSINIEGLSLAKEELLAKMSEDISCDILCIQETHRDITMRRPKILGMQLAVERPHRQYGSAIFVRSGVAISATSLTEVNNIEILSVELDSCTVSSLYKPPGADFYFTPPTSCHNHEAHFVVGDFNSHSCVWGYDEDDRNGEAVLTWADNSRMSLLHDSKLPPSFNSGRWKRGYNPDLIFVKESISHQCTKRVLNPIPNTQHRPICCVAYAAVRPKSVPFRRRFNFNKANWTKFTETLEAAISDIEPSIENYDLFVEAVKRSSRLSIPRGCRTSYLPGLNEESLNQLQEYLRLFQENPYSDGTIAAGQKLSTALANAKKDRWIELLENLDMSKSSRKAWQLLRRLDSDPLVNPGHANVTPDQIAHQLIQNGKTNCSRIKMKINRVPELETHQLSSPLNLKELREAIKRCKTGKAPGLDDLMMEQIKHLGPKAENWLLKFYNQCLAHKQIPRAWRKTKIIAILKPGKDASNARNYRPISLLCHLYKVYERMLLNRLGPVIEPKLIAQQAGFRPGKNCTGQILHLTEHIEEGYEKGCITGTVFVDLTAAYDTVQHRKMLHKVYHITRDFDFTKTVQTLLENRSFYVEFQGQKSRWRRQKNGLPQGSVLAPTLFNIFTNDQPQPPLTKSFIYADDLGLTTQAKDFETVEKQLTNALKDLSSYYKENHLKPNPAKTQVCAFHLRNREANRKLKVTWEGQELEHCFHPKYLGVTLDRTLTYRKHCMNTKHKVAARNNILRKLTGSAWGADPQVIRTSALALSFSTAEYACPVWAKSAHAKQVDIALNETCRIITGCLKPTPVDKLYKLAGIAPPDVRREVAANGERKKVEHCESHPLHGYHPPPTRLKSRKGFMRTTTPLDVPPAAARVSLWAAKPGNSNWMAPQEGLPPGANQEWATWKSLNRLRSGVGRSKDNLARWHYLEESSTLCDCGAEQTTQHMYACPQCPASCTEEELFKATDNAVAVARFWSKTI

SEQ ID NO: 212 - protein, 982 aa, synthetic construct
MDEYQRSLSRPLLTIMSINIEGLSLAKEELLAKMSEDISCDILCIQETHRDITMRRPKILGMQLAVERPHRQYGSAIFVRSGVAISATSLTEVNNIEILSVELDSCTVSSLYKPPGADFYFTPPTSCHNHEAHFVVGDFNSHSCVWGYDEDDRNGEAVLTWADNSRMSLLHDSKLPPSFNSGRWKRGYNPDLIFVKESISHQCTKRVLNPIPNTQHRPICCVAYAAVRPKSVPFRRRFNFNKANWTKFTETLEAAISDIEPSIENYDLFVEAVKRSSRLSIPRGCRTSYLPGLNEESLNQLQEYLRLFQENPYSDGTIAAGQKLSTALANAKKDRWIELLENLDMSKSSRKAWQLLRRLDSDPLVNPGHANVTPDQIAHQLIQNGKTNCSRIKMKINRVPELETHQLSSPLNLKELREAIKRCKTGKAPGLDDLMMEQIKHLGPKAENWLLKFYNQCLAHKQIPRAWRKTKIIAILKPGKDASNARNYRPISLLCHLYKVYERMLLNRLGKVIEPKLIAQQAGFRPGKNCTGQILHLTEHIEEGYEKGCITGTVFVDLTAAYDTVQHRKMLHKVYHITRDFDFTKTVQTLLENRSFYVEFQGQKSRWRRQKNGLPQGSVLAPTLFNIFTNDQPQPPLTKSFIYADDLGLTTQAKDFETVEKQLTNALKDLSSYYKENHLKPNPAKTQVCAFHLRNREANRKLKVTWEGQELEHCFHPKYLGVTLDRTLTYRKHCMNTKHKVAARNNILRKLTGSAWGADPQVIRTSALALSFSTAEYACPVWHKSAHAKQVDIALNETCRIITGCLKPTPVDKLYKLAGIAPPDVRREVAANGERKKVEHCESHPLHGYHPPPTRLKSRKGFMRTTTPLDVPPAAARVSLWAAKPGNSNWMAPQEGLPPGANQEWATWKSLNRLRSGVGRSKDNLARWHYLEESSTLCDCGAEQTTQHMYACPQCPASCTEEELFKATDNAVAVARFWSKTI

SEQ ID NO: 213 - protein, 982 aa, synthetic construct
MDEYQRSLSRPLLTIMSINIEGLSLAKEELLAKMSEDISCDILCIQETHRDITMRRPKILGMQLAVERPHRQYGSAIFVRSGVAISATSLTEVNNIEILSVELDSCTVSSLYKPPGADFYFTPPTSCHNHEAHFVVGDFNSHSCVWGYDEDDRNGEAVLTWADNSRMSLLHDSKLPPSFNSGRWKRGYNPDLIFVKESISHQCTKRVLNPIPNTQHRPICCVAYAAVRPKSVPFRRRFNFNKANWTKFTETLEAAISDIEPSIENYDLFVEAVKRSSRLSIPRGCRTSYLPGLNEESLNQLQEYLRLFQENPYSDGTIAAGQKLSTALANAKKDRWIELLENLDMSKSSRKAWQLLRRLDSDPLVNPGHANVTPDQIAHQLIQNGKTNCSRIKMKINRVPELETHQLSSPLNLKELREAIKRCKTGKAPGLDDLMMEQIKHLGPKAENWLLKFYNQCLAHKQIPRAWRKTKIIAILKPGKDASNARNYRPISLLCHLYKVYERMLLNRLGPVIESKLIAQQAGFRPGKNCTGQILHLTEHIEEGYEKGCITGTVFVDLTAAYDTVQHRKMLHKVYHITRDFDFTKTVQTLLENRSFYVEFQGQKSRWRRQKNGLPQGSVLAPTLFNIFTNDQPQPPLTKSFIYADDLGLTTQAKDFETVEKQLTNALKDLSSYYKENHLKPNPAKTQVCAFHLRNREANRKLKVTWEGQELEHCFHPKYLGVTLDRTLTYRKHCMNTKHKVAARNNILRKLTGSAWGADPQVIRTSALALSFSTAEYACPVWHKSAHAKQVDIALNETCRIITGCLKPTPVDKLYKLAGIAPPDVRREVAANGERKKVEHCESHPLHGYHPPPTRLKSRKGFMRTTTPLDVPPAAARVSLWAAKPGNSNWMAPQEGLPPGANQEWATWKSLNRLRSGVGRSKDNLARWHYLEESSTLCDCGAEQTTQHMYACPQCPASCTEEELFKATDNAVAVARFWSKTI

SEQ ID NO: 214 - protein, 982 aa, synthetic construct
MDEYQRSLSRPLLTIMSINIEGLSLAKEELLAKMSEDISCDILCIQETHRDITMRRPKILGMQLAVERPHRQYGSAIFVRSGVAISATSLTEVNNIEILSVELDSCTVSSLYKPPGADFYFTPPTSCHNHEAHFVVGDFNSHSCVWGYDEDDRNGEAVLTWADNSRMSLLHDSKLPPSFNSGRWKRGYNPDLIFVKESISHQCTKRVLNPIPNTQHRPICCVAYAAVRPKSVPFRRRFNFNKANWTKFTETLEAAISDIEPSIENYDLFVEAVKRSSRLSIPRGCRTSYLPGLNEESLNQLQEYLRLFQENPYSDGTIAAGQKLSTALANAKKDRWIELLENLDMSKSSRKAWQLLRRLDSDPLVNPGHANVTPDQIAHQLIQNGKTNCSRIKMKINRVPELETHQLSSPLNLKELREAIKRCKTGKAPGLDDLMMEQIKHLGPKAENWLLKFYNQCLAHKQIPRAWRKTKIIAILKPGKDASNARNYRPISLLCHLYKVYERMLLNRLGPVIEPKLIAQQAGFRPGKNCTGQILHLTEHIEEGYEKGCITGTVFVDLTAAYDTVQHRKMLHKVYHITRDFDFTKTVQTLLENRSFYVEFQGQKSRWRRQKNGLPQGSVLAPTLFNIFTNDQPQPPLTKSFIYADDLGLTTQAKDFETVEKQLTNALKDLSSYYKENHLKPNPAKTQVCAFHLRNREANRKLKVTWEGQELEHCFHPKYLGVTLDRTLTYRKHCMNTKHKVAARNNILRKLTGSAWGADPQVIRTSALALSFSTAEYAAPVWHKSAHAKQVDIALNETCRIITGCLKPTPVDKLYKLAGIAPPDVRREVAANGERKKVEHCESHPLHGYHPPPTRLKSRKGFMRTTTPLDVPPAAARVSLWAAKPGNSNWMAPQEGLPPGANQEWATWKSLNRLRSGVGRSKDNLARWHYLEESSTLCDCGAEQTTQHMYACPQCPASCTEEELFKATDNAVAVARFWSKTI

SEQ ID NO: 215 - protein, 982 aa, synthetic construct
MDEYQRSLSRPLLTIMSINIEGLSLAKEELLAKMSEDISCDILCIQETHRDITMRRPKILGMQLAVERPHRQYGSAIFVRSGVAISATSLTEVNNIEILSVELDSCTVSSLYKPPGADFYFTPPTSCHNHEAHFVVGDFNSHSCVWGYDEDDRNGEAVLTWADNSRMSLLHDSKLPPSFNSGRWKRGYNPDLIFVKESISHQCTKRVLNPIPNTQHRPICCVAYAAVRPKSVPFRRRFNFNKANWTKFTETLEAAISDIEPSIENYDLFVEAVKRSSRLSIPRGCRTSYLPGLNEESLNQLQEYLRLFQENPYSDGTIAAGQKLSTALANAKKDRWIELLENLDMSKSSRKAWQLLRRLDSDPLVNPGHANVTPDQIAHQLIQNGKTNCSRIKMKINRVPELETHQLSSPLNLKELREAIKRCKTGKAPGLDDLMMEQIKHLGPKAENWLLKFYNQCLAHKQIPRAWRKTKIIAILKPGKDASNARNYRPISLLCHLYKVYERMLLNRLGPVIEPKLIAQQAGFRPGKNCTGQILHLTEHIEEGYEKGCITGTVFVDLTAAYDTVQHRKMLHKVYHITRDFDFTKTVQTLLENRSFYVEFQGQKSRWRRQKNGLPQGSVLAPTLFNIFTNDQPQPPLTKSFIYADDLGLTTQAKDFETVEKQLTNALKDLSSYYKENHLKPNPAKTQVCAFHLRNREANRKLKVTWEGQELEHCFHPKYLGVTLDRTLTYRKHCMNTKHKVAARNNILRKLTGSAWGADPQVIRTSALALSFSTAEYACPVWHKSAHAKQVDIALNETCRIITGCLKWTPVDKLYKLAGIAPPDVRREVAANGERKKVEHCESHPLHGYHPPPTRLKSRKGFMRTTTPLDVPPAAARVSLWAAKPGNSNWMAPQEGLPPGANQEWATWKSLNRLRSGVGRSKDNLARWHYLEESSTLCDCGAEQTTQHMYACPQCPASCTEEELFKATDNAVAVARFWSKTI

SEQ ID NO: 216 - protein, 982 aa, synthetic construct
MDEYQRSLSRPLLTIMSINIEGLSLAKEELLAKMSEDISCDILCIQETHRDITMRRPKILGMQLAVERPHRQYGSAIFVRSGVAISATSLTEVNNIEILSVELDSCTVSSLYKPPGADFYFTPPTSCHNHEAHFVVGDFNSHSCVWGYDEDDRNGEAVLTWADNSRMSLLHDSKLPPSFNSGRWKRGYNPDLIFVKESISHQCTKRVLNPIPNTQHRPICCVAYAAVRPKSVPFRRRFNFNKANWTKFTETLEAAISDIEPSIENYDLFVEAVKRSSRLSIPRGCRTSYLPGLNEESLNQLQEYLRLFQENPYSDGTIAAGQKLSTALANAKKDRWIELLENLDMSKSSRKAWQLLRRLDSDPLVNPGHANVTPDQIAHQLIQNGKTNCSRIKMKINRVPELETHQLSSPLNLKELREAIKRCKTGKAPGLDDLMMEQIKHLGPKAENWLLKFYNQCLAHKQIPRAWRKTKIIAILKPGKDASNARNYRPISLLCHLYKVYERMLLNRLGPVIEPKLIAQQAGFRPGKNCTGQILHLTEHIEEGYEKGCITGTVFVDLTAAYDTVQHRKMLHKVYHITRDFDFTKTVQTLLENRSFYVEFQGQKSRWRRQKNGLPQGSVLAPTLFNIFTNDQPQPPLTKSFIYADDLGLTTQAKDFETVEKQLTNALKDLSSYYKENHLKPNPAKTQVCAFHLRNREANRKLKVTWEGQELEHCFHPKYLGVTLDRTLTYRKHCMNTKHKVAARNNILRKLTGYAWGADPQVIRTSALALSFSTAEYACPVWHKSAHAKQVDIALNETCRIITGCLKPTPVDKLYKLAGIAPPDVRREVAANGERKKVEHCESHPLHGYHPPPTRLKSRKGFMRTTTPLDVPPAAARVSLWAAKPGNSNWMAPQEGLPPGANQEWATWKSLNRLRSGVGRSKDNLARWHYLEESSTLCDCGAEQTTQHMYACPQCPASCTEEELFKATDNAVAVARFWSKTI

SEQ ID NO: 217 - protein, 982 aa, synthetic construct
MDEYQRSLSRPLLTIMSINIEGLSLAKEELLAKMSEDISCDILCIQETHRDITMRRPKILGMQLAVERPHRQYGSAIFVRSGVAISATSLTEVNNIEILSVELDSCTVSSLYKPPGADFYFTPPTSCHNHEAHFVVGDFNSHSCVWGYDEDDRNGEAVLTWADNSRMSLLHDSKLPPSFNSGRWKRGYNPDLIFVKESISHQCTKRVLNPIPNTQHRPICCVAYAAVRPKSVPFRRRFNFNKANWTKFTETLEAAISDIEPSIENYDLFVEAVKRSSRLSIPRGCRTSYLPGLNEESLNQLQEYLRLFQENPYSDGTIAAGQKLSTALANAKKDRWIELLENLDMSKSSRKAWQLLRRLDSDPLVNPGHANVTPDQIAHQLIQNGKTNCSRIKMKINRVPELETHQLSSPLNLKELREAIKRCKTGKAPGLDDLMMEQIKHLGPKAENWLLKFYNQCLAHKQIPRAWRKTKIIAILKPGKDASNARNYRPISLLCHLYKVYERMLLNRLGPVIEPKLIAQQAGFRPGKNCTGQILHLTEHIEEGYEKGCITGTVFVDLTAAYDTVQHRKMLHKVYHITRDFDFTKTVQTLLENRSFYVEFQGQKSRWRRQKNGLPQGSVLAPTLFNIFTNDQPQPPLTKSFIYADDLGLTTQAKDFETVEKQLTNALKDLSSYYKENHLKPNPAKTQVCAFHLRNREANRKLKVTWEGQELEHCFHPKYLGVTLDRTLTYRKHCMNTKHKVAARNNILRKLTGSAWGADPQVIRTSALALSFSTAEYACPVWHKSAHAKQVDNALNETCRIITGCLKPTPVDKLYKLAGIAPPDVRREVAANGERKKVEHCESHPLHGYHPPPTRLKSRKGFMRTTTPLDVPPAAARVSLWAAKPGNSNWMAPQEGLPPGANQEWATWKSLNRLRSGVGRSKDNLARWHYLEESSTLCDCGAEQTTQHMYACPQCPASCTEEELFKATDNAVAVARFWSKTI

SEQ ID NO: 218 - protein, 982 aa, synthetic construct
MDEYQRSLSRPLLTIMSINIEGLSLAKEELLAKMSEDISCDILCIQETHRDITMRRPKILGMQLAVERPHRQYGSAIFVRSGVAISATSLTEVNNIEILSVELDSCTVSSLYKPPGADFYFTPPTSCHNHEAHFVVGDFNSHSCVWGYDEDDRNGEAVLTWADNSRMSLLHDSKLPPSFNSGRWKRGYNPDLIFVKESISHQCTKRVLNPIPNTQHRPICCVAYAAVRPKSVPFRRRFNFNKANWTKFTETLEAAISDIEPSIENYDLFVEAVKRSSRLSIPRGCRTSYLPGLNEESLNQLQEYLRLFQENPYSDGTIAAGQKLSTALANAKKDRWIELLENLDMSKSSRKAWQLLRRLDSDPLVNPGHANVTPDQIAHQLIQNGKTNCSRIKMKINRVPELETHQLSSPLNLKELREAIKRCKTGKAPGLDDLMMEQIKHLGPKAENWLLKFYNQCLAHKQIPRAWRKTKIIAILKWGKDASNARNYRPISLLCHLYKVYERMLLNRLGPVIEPKLIAQQAGFRPGKNCTGQILHLTEHIEEGYEKGCITGTVFVDLTAAYDTVQHRKMLHKVYHITRDFDFTKTVQTLLENRSFYVEFQGQKSRWRRQKNGLPQGSVLAPTLFNIFTNDQPQPPLTKSFIYADDLGLTTQAKDFETVEKQLTNALKDLSSYYKENHLKPNPAKTQVCAFHLRNREANRKLKVTWEGQELEHCFHPKYLGVTLDRTLTYRKHCMNTKHKVAARNNILRKLTGSAWGADPQVIRTSALALSFSTAEYACPVWHKSAHAKQVDIALNETCRIITGCLKPTPVDKLYKLAGIAPPDVRREVAANGERKKVEHCESHPLHGYHPPPTRLKSRKGFMRTTTPLDVPPAAARVSLWAAKPGNSNWMAPQEGLPPGANQEWATWKSLNRLRSGVGRSKDNLARWHYLEESSTLCDCGAEQTTQHMYACPQCPASCTEEELFKATDNAVAVARFWSKTI

SEQ ID NO: 219 - protein, 982 aa, synthetic construct
MDEYQRSLSRPLLTIMSINIEGLSLAKEELLAKMSEDISCDILCIQETHRDITMRRPKILGMQLAVERPHRQYGSAIFVRSGVAISATSLTEVNNIEILSVELDSCTVSSLYKPPGADFYFTPPTSCHNHEAHFVVGDFNSHSCVWGYDEDDRNGEAVLTWADNSRMSLLHDSKLPPSFNSGRWKRGYNPDLIFVKESISHQCTKRVLNPIPNTQHRPICCVAYAAVRPKSVPFRRRFNFNKANWTKFTETLEAAISDIEPSIENYDLFVEAVKRSSRLSIPRGCRTSYLPGLNEESLNQLQEYLRLFQENPYSDGTIAAGQKLSTALANAKKDRWIELLENLDMSKSSRKAWQLLRRLDSDPLVNPGHANVTPDQIAHQLIQNGKTNCSRIKMKINRVPELETHQLSSPLNLKELREAIKRCKTGKAPGLDDLMMEQIKHLGPKAENWLLKFYNQCLAHKQIPRAWRKTKIIAILKPGKDASNARNYRPRSLLCHLYKVYERMLLNRLGPVIEPKLIAQQAGFRPGKNCTGQILHLTEHIEEGYEKGCITGTVFVDLTAAYDTVQHRKMLHKVYHITRDFDFTKTVQTLLENRSFYVEFQGQKSRWRRQKNGLPQGSVLAPTLFNIFTNDQPQPPLTKSFIYADDLGLTTQAKDFETVEKQLTNALKDLSSYYKENHLKPNPAKTQVCAFHLRNREANRKLKVTWEGQELEHCFHPKYLGVTLDRTLTYRKHCMNTKHKVAARNNILRKLTGSAWGADPQVIRTSALALSFSTAEYACPVWHKSAHAKQVDIALNETCRIITGCLKPTPVDKLYKLAGIAPPDVRREVAANGERKKVEHCESHPLHGYHPPPTRLKSRKGFMRTTTPLDVPPAAARVSLWAAKPGNSNWMAPQEGLPPGANQEWATWKSLNRLRSGVGRSKDNLARWHYLEESSTLCDCGAEQTTQHMYACPQCPASCTEEELFKATDNAVAVARFWSKTI

SEQ ID NO: 220 - protein, 982 aa, synthetic construct
MDEYQRSLSRPLLTIMSINIEGLSLAKEELLAKMSEDISCDILCIQETHRDITMRRPKILGMQLAVERPHRQYGSAIFVRSGVAISATSLTEVNNIEILSVELDSCTVSSLYKPPGADFYFTPPTSCHNHEAHFVVGDFNSHSCVWGYDEDDRNGEAVLTWADNSRMSLLHDSKLPPSFNSGRWKRGYNPDLIFVKESISNQCTKRVLNPIPNTQHRPICCVAYAAVRPKSVPFRRRFNFNKANWTKFTETLEAAISDIEPSIENYDLFVEAVKRSSRLSIPRGCRTSYLPGLNEESLNQLQEYLRLFQENPYSDGTIAAGQKLSTALANAKKDRWIELLENLDMSKSSRKAWQLLRRLDSDPLVNPGHANVTPDQIAHQLIQNGKTNCSRIKMKINRVPELETHQLSSPLNLKELREAIKRCKTGKAPGLDDLMMEQIKHLGPKAENWLLKFYNQCLAHKQIPRAWRKTKIIAILKPGKDASNARNYRPISLLCHLYKVYERMLLNRLGPVIEPKLIAQQAGFRPGKNCTGQILHLTEHIEEGYEKGCITGTVFVDLTAAYDTVQHRKMLHKVYHITRDFDFTKTVQTLLENRSFYVEFQGQKSRWRRQKNGLPQGSVLAPTLFNIFTNDQPQPPLTKSFIYADDLGLTTQAKDFETVEKQLTNALKDLSSYYKENHLKPNPAKTQVCAFHLRNREANRKLKVTWEGQELEHCFHPKYLGVTLDRTLTYRKHCMNTKHKVAARNNILRKLTGSAWGADPQVIRTSALALSFSTAEYACPVWHKSAHAKQVDIALNETCRIITGCLKPTPVDKLYKLAGIAPPDVRREVAANGERKKVEHCESHPLHGYHPPPTRLKSRKGFMRTTTPLDVPPAAARVSLWAAKPGNSNWMAPQEGLPPGANQEWATWKSLNRLRSGVGRSKDNLARWHYLEESSTLCDCGAEQTTQHMYACPQCPASCTEEELFKATDNAVAVARFWSKTI

SEQ ID NO: 221 - protein, 982 aa, synthetic construct
MDEYQRSLSRPLLTIMSINIEGLSLAKEELLAKMSEDISCDILCIQETHRDITMRRPKILGMQLAVERPHRQYGSAIFVRSGVAISATSLTEVNNIEILSVELDSCTVSSLYKPPGADFYFTPPTSCHNHEAHFVVGDFNSHSCVWGYDEDDRNGEAVLTWADNSRMSLLHDSKLPPSFNSGRWKRGYNPDLIFVKESISHQCTKRVLNPIPNTQHRPICCVVYAAVRPKSVPFRRRFNFNKANWTKFTETLEAAISDIEPSIENYDLFVEAVKRSSRLSIPRGCRTSYLPGLNEESLNQLQEYLRLFQENPYSDGTIAAGQKLSTALANAKKDRWIELLENLDMSKSSRKAWQLLRRLDSDPLVNPGHANVTPDQIAHQLIQNGKTNCSRIKMKINRVPELETHQLSSPLNLKELREAIKRCKTGKAPGLDDLMMEQIKHLGPKAENWLLKFYNQCLAHKQIPRAWRKTKIIAILKPGKDASNARNYRPISLLCHLYKVYERMLLNRLGPVIEPKLIAQQAGFRPGKNCTGQILHLTEHIEEGYEKGCITGTVFVDLTAAYDTVQHRKMLHKVYHITRDFDFTKTVQTLLENRSFYVEFQGQKSRWRRQKNGLPQGSVLAPTLFNIFTNDQPQPPLTKSFIYADDLGLTTQAKDFETVEKQLTNALKDLSSYYKENHLKPNPAKTQVCAFHLRNREANRKLKVTWEGQELEHCFHPKYLGVTLDRTLTYRKHCMNTKHKVAARNNILRKLTGSAWGADPQVIRTSALALSFSTAEYACPVWHKSAHAKQVDIALNETCRIITGCLKPTPVDKLYKLAGIAPPDVRREVAANGERKKVEHCESHPLHGYHPPPTRLKSRKGFMRTTTPLDVPPAAARVSLWAAKPGNSNWMAPQEGLPPGANQEWATWKSLNRLRSGVGRSKDNLARWHYLEESSTLCDCGAEQTTQHMYACPQCPASCTEEELFKATDNAVAVARFWSKTI

SEQ ID NO: 222 - protein, 982 aa, synthetic construct
MDEYQRSLSRPLLTIMSINIEGLSLAKEELLAKMSEDISCDILCIQETHRDITMRRPKILGMQLAVERPHRQYGSAIFVRSGVAISATSLTEVNNIEILSVELDSCTVSSLYKPPGADFYFTPPTSCHNHEAHFVVGDFNSHSCVWGYDEDDRNGEAVLTWADNSRMSLLHDSKLPPSFNSGRWKRGYNPDLIFVKESISHQCTKRVLNPIPNTQHRPICCVAYAAVRPKSVPFRRRFNFNKANWTKFTETLEAAISDIEPSIENYDLFVEAVKRSSRLSIPRGCRTSYLPGLNEESLNQLQEYLRLFKENPYSDGTIAAGQKLSTALANAKKDRWIELLENLDMSKSSRKAWQLLRRLDSDPLVNPGHANVTPDQIAHQLIQNGKTNCSRIKMKINRVPELETHQLSSPLNLKELREAIKRCKTGKAPGLDDLMMEQIKHLGPKAENWLLKFYNQCLAHKQIPRAWRKTKIIAILKPGKDASNARNYRPISLLCHLYKVYERMLLNRLGPVIEPKLIAQQAGFRPGKNCTGQILHLTEHIEEGYEKGCITGTVFVDLTAAYDTVQHRKMLHKVYHITRDFDFTKTVQTLLENRSFYVEFQGQKSRWRRQKNGLPQGSVLAPTLFNIFTNDQPQPPLTKSFIYADDLGLTTQAKDFETVEKQLTNALKDLSSYYKENHLKPNPAKTQVCAFHLRNREANRKLKVTWEGQELEHCFHPKYLGVTLDRTLTYRKHCMNTKHKVAARNNILRKLTGSAWGADPQVIRTSALALSFSTAEYACPVWHKSAHAKQVDIALNETCRIITGCLKPTPVDKLYKLAGIAPPDVRREVAANGERKKVEHCESHPLHGYHPPPTRLKSRKGFMRTTTPLDVPPAAARVSLWAAKPGNSNWMAPQEGLPPGANQEWATWKSLNRLRSGVGRSKDNLARWHYLEESSTLCDCGAEQTTQHMYACPQCPASCTEEELFKATDNAVAVARFWSKTI

SEQ ID NO: 223 - protein, 982 aa, synthetic construct
MDEYQRSLSRPLLTIMSINIEGLSLAKEELLAKMSEDISCDILCIQETHRDITMRRPKILGMQLAVERPHRQYGSAIFVRSGVAISATSLTEVNNIEILSVELDSCTVSSLYKPPGADFYFTPPTSCHNHEAHFVVGDFNSHSCVWGYDEDDRNGEAVLTWADNSRMSLLHDSKLPPSFNSGRWKRGYNPDLIFVKESISHQCTKRVLNPIPNTQHRPICCVAYAAVRPKSVPFRRRFNFNKANWTKFTETLEAAISDIEPSIENYDLFVEAVKRSSRLSIPRGCRTSYLPGLNEESLNQLQEYLRLFQENPYSDGTIAAGQKLSTALANAKRDRWIELLENLDMSKSSRKAWQLLRRLDSDPLVNPGHANVTPDQIAHQLIQNGKTNCSRIKMKINRVPELETHQLSSPLNLKELREAIKRCKTGKAPGLDDLMMEQIKHLGPKAENWLLKFYNQCLAHKQIPRAWRKTKIIAILKPGKDASNARNYRPISLLCHLYKVYERMLLNRLGPVIEPKLIAQQAGFRPGKNCTGQILHLTEHIEEGYEKGCITGTVFVDLTAAYDTVQHRKMLHKVYHITRDFDFTKTVQTLLENRSFYVEFQGQKSRWRRQKNGLPQGSVLAPTLFNIFTNDQPQPPLTKSFIYADDLGLTTQAKDFETVEKQLTNALKDLSSYYKENHLKPNPAKTQVCAFHLRNREANRKLKVTWEGQELEHCFHPKYLGVTLDRTLTYRKHCMNTKHKVAARNNILRKLTGSAWGADPQVIRTSALALSFSTAEYACPVWHKSAHAKQVDIALNETCRIITGCLKPTPVDKLYKLAGIAPPDVRREVAANGERKKVEHCESHPLHGYHPPPTRLKSRKGFMRTTTPLDVPPAAARVSLWAAKPGNSNWMAPQEGLPPGANQEWATWKSLNRLRSGVGRSKDNLARWHYLEESSTLCDCGAEQTTQHMYACPQCPASCTEEELFKATDNAVAVARFWSKTI

SEQ ID NO: 224 - protein, 982 aa, synthetic construct
MDEYQRSLSRPLLTIMSINIEGLSLAKEELLAKMSEDISCDILCIQETHRDITMRRPKILGMQLAVERPHRQYGSAIFVRSGVAISATSLTEVNNIEILSVELDSCTVSSLYKPPGADFYFTPPTSCHNHEAHFVVGDFNSHSCVWGYDEDDRNGEAVLTWADNSRMSLLHDSKLPPSFNSGRWKRGYNPDLIFVKESISHQCTKRVLNPIPNTQHRPICCVAYAAVRPKSVPFRRRFNFNKANWTKFTETLEAAISDIEPSIENYDLFVEAVKRSSRLSIPRGCRTSYLPGLNEESLNQLQEYLRLFQENPYSDGTIAAGQKLSTALANAKKDRWIELLENLDMSKSSRKAWQLLRRLDSDPLVNPGHANVTPDQIAHQLIQNGKTNCSRIKMKINRVPELETHQLSSPLNLKELREAIKRCKTGKAPGLDDLMMEQIKHLGPKAENWLLKFYNQCLAHKQIPKAWRKTKIIAILKPGKDASNARNYRPISLLCHLYKVYERMLLNRLGPVIEPKLIAQQAGFRPGKNCTGQILHLTEHIEEGYEKGCITGTVFVDLTAAYDTVQHRKMLHKVYHITRDFDFTKTVQTLLENRSFYVEFQGQKSRWRRQKNGLPQGSVLAPTLFNIFTNDQPQPPLTKSFIYADDLGLTTQAKDFETVEKQLTNALKDLSSYYKENHLKPNPAKTQVCAFHLRNREANRKLKVTWEGQELEHCFHPKYLGVTLDRTLTYRKHCMNTKHKVAARNNILRKLTGSAWGADPQVIRTSALALSFSTAEYACPVWHKSAHAKQVDIALNETCRIITGCLKPTPVDKLYKLAGIAPPDVRREVAANGERKKVEHCESHPLHGYHPPPTRLKSRKGFMRTTTPLDVPPAAARVSLWAAKPGNSNWMAPQEGLPPGANQEWATWKSLNRLRSGVGRSKDNLARWHYLEESSTLCDCGAEQTTQHMYACPQCPASCTEEELFKATDNAVAVARFWSKTI

SEQ ID NO: 225 - protein, 982 aa, synthetic construct
MDEYQRSLSRPLLTIMSINIEGLSLAKEELLAKMSEDISCDILCIQETHRDITMRRPKILGMQLAVERPHRQYGSAIFVRSGVAISATSLTEVNNIEILSVELDSCTVSSLYKPPGADFYFTPPTSCHNHEAHFVVGDFNSHSCVWGYDEDDRNGEAVLTWADNSRMSLLHDSKLPPSFNSGRWKRGYNPDLIFVKESISHQCTKRVLNPIPNTQHRPICCVAYAAVRPKSVPFRRRFNFNKANWTKFTETLEAAISDIEPSIENYDLFVEAVKRSSRLSIPRGCRTSYLPGLNEESLNQLQEYLRLFQENPYSDGTIAAGQKLSTALANAKKDRWIELLENLDMSKSSRKAWQLLRRLDSDPLVNPGHANVTPDQIAHQLIQNGKTNCSRIKMKINRVPELETHQLSSPLNLKELREAIKRCKTGKAPGLDDLMMEQIKHLGPKAENWLLKFYNQCLAHKQIPRAWRKTKIIAILKPGKDASNARNYQPISLLCHLYKVYERMLLNRLGPVIEPKLIAQQAGFRPGKNCTGQILHLTEHIEEGYEKGCITGTVFVDLTAAYDTVQHRKMLHKVYHITRDFDFTKTVQTLLENRSFYVEFQGQKSRWRRQKNGLPQGSVLAPTLFNIFTNDQPQPPLTKSFIYADDLGLTTQAKDFETVEKQLTNALKDLSSYYKENHLKPNPAKTQVCAFHLRNREANRKLKVTWEGQELEHCFHPKYLGVTLDRTLTYRKHCMNTKHKVAARNNILRKLTGSAWGADPQVIRTSALALSFSTAEYACPVWHKSAHAKQVDIALNETCRIITGCLKPTPVDKLYKLAGIAPPDVRREVAANGERKKVEHCESHPLHGYHPPPTRLKSRKGFMRTTTPLDVPPAAARVSLWAAKPGNSNWMAPQEGLPPGANQEWATWKSLNRLRSGVGRSKDNLARWHYLEESSTLCDCGAEQTTQHMYACPQCPASCTEEELFKATDNAVAVARFWSKTI

SEQ ID NO: 226 - protein, 982 aa, synthetic construct
MDEYQRSLSRPLLTIMSINIEGLSLAKEELLAKMSEDISCDILCIQETHRDITMRRPKILGMQLAVERPHRQYGSAIFVRSGVAISATSLTEVNNIEILSVELDSCTVSSLYKPPGADFYFTPPTSCHNHEAHFVVGDFNSHSCVWGYDEDDRNGEAVLTWADNSRMSLLHDSKLPPSFNSGRWKRGYNPDLIFVKESISHQCTKRVLNPIPNTQHRPICCVAYAAVRPKSVPFRRRFNFNKANWTKFTETLEAAISDIEPSIENYDLFVEAVKRSSRLSIPRGCRTSYLPGLNEESLNQLQEYLRLFQENPYSDGTIAAGQKLSTALANAKKDRWIELLENLDMSKSSRKAWQLLRRLDSDPLVNPGHANVTPDQIAHQLIQNGKTNCSRIKMKINRVPELETHQLSSPLNLKELREAIKRCKTGKAPGLDDLMMEQIKHLGPKAENWLLKFYNQCLAHKQIPRAWRKTKIIAILKPGKDASNARNYRPISLLCHLYKVYERMLLNRLGPVIEPKLIAQQAGFRPGKNCTGQILHLTEHIEEGYEKGCITGTVFVDLTAAYDTVQHRKMLHKVYHITRDFDFTKTVQTLLENRSFYVEFQGQKSRWRRQKNGLPQGSVLAPTLFNIFTNDQPQPPLTKSFIYADDLGLTTQAKDFETVEKQLTNALKDLSSYYKENHLKPNPAKTQVCAFHLRNREANRKLKVTWEGQELEHCFHPKYLGVTLDRTLTYRKHCMNTKHKVAARNNILRKLTGSAWGADPQVIRTSALALSFSTAEYACPVWHKSAHAKQVDIALNETCRIITGCLKPTPVDKLYKLAGIAPPDVRREVAANGERKKVETCESHPLHGYHPPPTRLKSRKGFMRTTTPLDVPPAAARVSLWAAKPGNSNWMAPQEGLPPGANQEWATWKSLNRLRSGVGRSKDNLARWHYLEESSTLCDCGAEQTTQHMYACPQCPASCTEEELFKATDNAVAVARFWSKTI

SEQ ID NO: 227 - protein, 982 aa, synthetic construct
MDEYQRSLSRPLLTIMSINIEGLSLAKEELLAKMSEDISCDILCIQETHRDITMRRPKILGMQLAVERPHRQYGSAIFVRSGVAISATSLTEVNNIEILSVELDSCTVSSLYKPPGADFYFTPPTSCHNHEAHFVVGDFNSHSCVWGYDEDDRNGEAVLTWADNSRMSLLHDSKLPPSFNSGRWKRGYNPDLIFVKESISHQCTKRVLNPIPNTQHRPICCVAYAAVRPKSVPFRRRFNFNKANWTKFTETLEAAISDIEPSIENYDLFVEAVKRSSRLSIPRGCRTSYLPGLNEESLNQLQEYLRLFQENPYSDGTIAAGQKLSTALANAKKDRWIELLENLDMSKSSRKAWQLLRRLDSDPLVNPGHANVTPDQIAHQLIQNGKTNCSRIKMKINRVPELETHQLSSPLNLKELREAIKRCKTGKAPGLDDLMMEQIKHLGPKAENWLLKFYNQCLAHKQIPRAWRKTKIIAILKPGKDASNARNYRPISLLCHLYKVYERMLLNRLGPVIEPKLIAQQAGFRPGKNCTGQILHLTEHIEEGYEKGCITGTVFVDLTAAYDTVQHRKMLHKVYHITRDFDFTKTVQTLLENRSFYVEFQGQKSRWRRQKNGLPQGSVLAPTLFNIFTNDQPQPPLTKSFIYADDLGLTTQAKDFETVEKQLTNALKDLSSYYKENHLKPNPAKTQVCAFHLRNREANRKLKVTWEGQELEHCFHPKYLGVTLDRTLTYRKHCMNTKHKVAARNNILRKLTGSAWGADPQVIRTSALALSFSTAEYACPVWHKSAHAKQVDIALNETCRIITGCLKPTPVDKLYKLAGIAPPDVRREVAANGERKKVEHCESHPLHGYHPPPTRLKRRKGFMRTTTPLDVPPAAARVSLWAAKPGNSNWMAPQEGLPPGANQEWATWKSLNRLRSGVGRSKDNLARWHYLEESSTLCDCGAEQTTQHMYACPQCPASCTEEELFKATDNAVAVARFWSKTI

SEQ ID NO: 228 - protein, 982 aa, synthetic construct
MDEYQRSLSRPLLTIMSINIEGLSLAKEELLAKMSEDISCDILCIQETHRDITMRRPKILGMQLAVERPHRQYGSAIFVRSGVAISATSLTEVNNIEILSVELDSCTVSSLYKPPGADFYFTPPTSCHNHEAHFVVGDFNSHSCVWGYDEDDRNGEAVLTWADNSRMSLLHDSKLPPSFNSGRWKRGYNPDLIFVKESISHQCTKRVLNPIPNTQHRPICCVAYAAVRPKSVPFRRRFNFNKANWTKFTETLEAAISDIEPSIENYDLFVEAVKRSSRLSIPRGCRTSYLPGLNEESLNQLQEYLRLFQENPYSDGTIAAGQKLSTALANAKKDRWIELLENLDMSKSSRKAWQLLRRLDSDPLVNPGHANVTPDQIAHQLIQNGKTNCSRIKMKINRVPELETHQLSSPLNLKELREAIKRCKTGKAPGLDDLMMEQIKHLGPKAENWLLKFYNQCLAHKQIPRAWRKTKIIAILKPGKDASNARNYRPISLLCHLYKVYERMLLNRLGPVIEPKLIAQQAGFRPGKNCTGQILHLTEHIEEGYEKGCITGTVFVDLTAAYDTVQHRKMLHKVYHITRDFDFTKTVQTLLENRSFYVEFQGQKSRWRRQKNGLPQGSVLAPTLFNIFTNDQPQPPLTKSFIYADDLGLTTQAKDFETVEKQLTNALKDLSSYYKENHLKPNPAKTQVCAFHLRNREANRKLKVTWEGQELEHCFHPKYLGVTLDRTLTYRKHCMNTKHKVAARNNILRKLTGSAWGADPQVIRTSALALSFSTAEYACPVWHKSAHAKQVDIALNETCRIITGCLKPTPVDKLYKLAGIAPPDVRREVAANGERKKVEHCESHPLHGYHPPPTRLKSRKGFMRTTTPLDVPPAAARVSLWAAKPGNSNWMHPQEGLPPGANQEWATWKSLNRLRSGVGRSKDNLARWHYLEESSTLCDCGAEQTTQHMYACPQCPASCTEEELFKATDNAVAVARFWSKTI

SEQ ID NO: 229 - protein, 982 aa, synthetic construct
MDEYQRSLSRPLLTIMSINIEGLSLAKEELLAKMSEDISCDILCIQETHRDITMRRPKILGMQLAVERPHRQYGSAIFVRSGVAISATSLTEVNNIEILSVELDSCTVSSLYKPPGADFYFTPPTSCHNHEAHFVVGDFNSHSCVWGYDEDDRNGEAVLTWADNSRMSLLHDSKLPPSFNSGRWKRGYNPDLIFVKESISHQCTKRVLNPIPNTQHRPICCVAYAAVRPKSVPFRRRFNFNKANWTKFTETLEAAISDIEPSIENYDLFVEAVKRSSRLSIPRGCRTSYLPGLNEESLNQLQEYLRLFQENPYSDGTIAAGQKLSTALANAKKDRWIELLENLDMSKSSRKAWQLLRRLDSDPLVNPGHANVTPDQIAHQLIQNGKTNCSRIKMKINRVPELETHQLSSPLNLKELREAIKRCKTGKAPGLDDLMMEQIKHLGPKAENWLLKFYNQCLAHKQIPRAWRKTKIIAILKPGKDASNARNYRPISLLCHLYKVYERMLLNRLGPVIEPKLIAQQAGFRPGKNCTGQILHLTEHIEEGYEKGCITGTVFVDLTAAYDTVQHRKMLHKVYHITRDFDFTKTVQTLLENRSFYVEFQGQKSRWRRQKNGLPQGSVLAPTLFNIFTNDQPQPPLTKSFIYADDLGLTTQAKDFETVEKQLTNALKDLSSYYKENHLKPNPAKTQVCAFHLRNREANRKLKVTWEGQELEHCFHPKYLGVTLDRTLTYRKHCMNTKHKVAARNNILRKLTGSAWGADPQVIRTSALALSFSTAEYACPVWHKSAHAKQVDIALNETCRIITGCLKPTPVDKLYKLAGIAPPDVRREVAANGERKKVEHCESHPLHGYHPPPTRLKSRKGFMRTTTPLDVPPAAARVSLWAAKPGNSNWMAPQEGLPPGANQHWATWKSLNRLRSGVGRSKDNLARWHYLEESSTLCDCGAEQTTQHMYACPQCPASCTEEELFKATDNAVAVARFWSKTI

SEQ ID NO: 230 - protein, 982 aa, synthetic construct
MDEYQRSLSRPLLTIMSINIEGLSLAKEELLAKMSEDISCDILCIQETHRDITMRRPKILGMQLAVERPHRQYGSAIFVRSGVAISATSLTEVNNIEILSVELDSCTVSSLYKPPGADFYFTPPTSCHNHEAHFVVGDFNSHSCVWGYDEDDRNGEAVLTWADNSRMSLLHDSKLPPSFNSGRWKRGYNPDLIFVKESISHQCTKRVLNPIPNTQHRPICCVAYAAVRPKSVPFRRRFNFNKANWTKFTETLEAAISDIEPSIENYDLFVEAVKRSSRLSIPRGCRTSYLPGLNEESLNQLQEYLRLFQENPYSDGTIAAGQKLSTALANAKKDRWIELLENLDMSKSSRKAWQLLRRLDSDPLVNPGHANVTPDQIAHQLIQNGKTNCSRIKMKINRVPELETHQLSSPLNLKELREAIKRCKTGKAPGLDDLMMEQIKHLGPKAENWLLKFYNQCLAHKQIPRAWRKTKIIAILKPGKDASNARNYRPISLLCHLYKVYERMLLNRLGPVIEPKLIAQQAGFRPGKNCTGQILHLTEHIEEGYEKGCITGTVFVDLTAAYDTVQHRKMLHKVYHITRDFDFTKTVQTLLENRSFYVEFQGQKSRWRRQKNGLPQGSVLAPTLFNIFTNDQPQPPLTKSFIYADDLGLTTQAKDFETVEKQLTNALKDLSSYYKENHLKPNPAKTQVCAFHLRNREANRKLKVTWEGQELEHCEHPKYLGVTLDRTLTYRKHCMNTKHKVAARNNILRKLTGSAWGADPQVIRTSALALSFSTAEYACPVWHKSAHAKQVDIALNETCRIITGCLKPTPVDKLYKLAGIAPPDVRREVAANGERKKVEHCESHPLHGYHPPPTRLKSRKGFMRTTTPLDVPPAAARVSLWAAKPGNSNWMAPQEGLPPGANQEWATWKSLNRLRSGVGRSKDNLARWHYLEESSTLCDCGAEQTTQHMYACPQCPASCTEEELFKATDNAVAVARFWSKTI

SEQ ID NO: 231 - protein, 982 aa, synthetic construct
MDEYQRSLSRPLLTIMSINIEGLSLAKEELLAKMSEDISCDILCIQETHRDITMRRPKILGMQLAVERPHRQYGSAIFVRSGVAISATSLTEVNNIEILSVELDSCTVSSLYKPPGADFYFTPPTSCHNHEAHFVVGDFNSHSCVWGYDEDDRNGEAVLTWADNSRMSLLHDSKLPPSFNSGRWKRGYNPDLIFVKESISHQCTKRVLNPIPNTQHRPICCVAYAAVRPKSVPFRRRFNFNKANWTKFTETLEAAISDIEPSIENYDLFVEAVKRSSRLSIPRGCRTSYLPGLNEESLNQLQEYLRLFQENPYSDGTIAAGQKLSTALANAKKDRWIELLENLDMSKSSRKAWQLLRRLDSDPLVNPGHANVTPDQIAHQLIQNGKTNCSRIKMKINRVPELETHQLSSPLNLKELREAIKRCKTGKAPGLDDLMMEQIKHLGPKAENWLLKFYNQCLAHKQIPRAWRKTKIIAILKPGKDASNARNYRPISLLCHLYKVYERMLLNRLGPVIEPKLIAQQAGFRPGKNCTGQILHLTEHIEEGYEKGCITGTVFVDLTAAYDTVQHRKMLHKVYHITRDFDFTKTVQTLLENRSFYVEFQGQKSRWRRQKNGLPQGSVLAPTLFNIFTNDQPQPPLTKSFIYADDLGLTTQAKDFETVERQLTNALKDLSSYYKENHLKPNPAKTQVCAFHLRNREANRKLKVTWEGQELEHCFHPKYLGVTLDRTLTYRKHCMNTKHKVAARNNILRKLTGSAWGADPQVIRTSALALSFSTAEYACPVWHKSAHAKQVDIALNETCRIITGCLKPTPVDKLYKLAGIAPPDVRREVAANGERKKVEHCESHPLHGYHPPPTRLKSRKGFMRTTTPLDVPPAAARVSLWAAKPGNSNWMAPQEGLPPGANQEWATWKSLNRLRSGVGRSKDNLARWHYLEESSTLCDCGAEQTTQHMYACPQCPASCTEEELFKATDNAVAVARFWSKTI

SEQ ID NO: 232 - protein, 982 aa, synthetic construct
MDEYQRSLSRPLLTIMSINIEGLSLAKEELLAKMSEDISCDILCIQETHRDITMRRPKILGMQLAVERPHRQYGSAIFVRSGVAISATSLTEVNNIEILSVELDSCTVSSLYKPPGADFYFTPPTSCHNHEAHFVVGDFNSHSCVWGYDEDDRNGEAVLTWADNSRMSLLHDSKLPPSFNSGRWKRGYNPDLIFVKESISHQCTKRVLNPIPNTQHRPICCVAYAAVRPKSVPFRRRFNFNKANWTKFTETLEAAISDIEPSIENYDLFVEAVKRSSRLSIPRGCRTSYLPGLNEESLNQLQEYLRLFQENPYSDGTIAAGQKLSTALANAKKDRWIELLENLDMSKSSRKAWQLLRRLDSDPLVNPGHANVTPDQIAHQLIQNGKTNCSRIKMKINRVPELETHQLSSPLNLKELREAIKRCKTGKAPGLDDLMMEQIKHLGPKAENWLLKFYNQCLAHKQIPRAWRKTKIIAILKPGKDASNARNYRPISLLCHLYKVYERMLLNRLGPVIEPKLIAQQAGFRPGKNCTGQILHLTEHIEEGYEKGCITGTVFVDLTAAYDTVQHRKMLHKVYHITRDFDFTKTVQTLLENRSFYVEFQGQKSRWRRQQNGLPQGSVLAPTLFNIFTNDQPQPPLTKSFIYADDLGLTTQAKDFETVEKQLTNALKDLSSYYKENHLKPNPAKTQVCAFHLRNREANRKLKVTWEGQELEHCFHPKYLGVTLDRTLTYRKHCMNTKHKVAARNNILRKLTGSAWGADPQVIRTSALALSFSTAEYACPVWHKSAHAKQVDIALNETCRIITGCLKPTPVDKLYKLAGIAPPDVRREVAANGERKKVEHCESHPLHGYHPPPTRLKSRKGFMRTTTPLDVPPAAARVSLWAAKPGNSNWMAPQEGLPPGANQEWATWKSLNRLRSGVGRSKDNLARWHYLEESSTLCDCGAEQTTQHMYACPQCPASCTEEELFKATDNAVAVARFWSKTI

SEQ ID NO: 233 - protein, 982 aa, synthetic construct
MDEYQRSLSRPLLTIMSINIEGLSLAKEELLAKMSEDISCDILCIQETHRDITMRRPKILGMQLAVERPHRQYGSAIFVRSGVAISATSLTEVNNIEILSVELDSCTVSSLYKPPGADFYFTPPTSCHNHEAHFVVGDFNSHSCVWGYDEDDRNGEAVLTWADNSRMSLLHDSKLPPSFNSGRWKRGYNPDLIFVKESISHQCTKRVLNPIPNTQHRPICCVAYAAVRPKSVPFRRRFNFNKANWTKFTETLEAAISDIEPSIENYDLFVEAVKRSSRLSIPRGCRTSYLPGLNEESLNQLQEYLRLFQENPYSDGTIAAGQKLSTALANAKKDRWIELLENLDMSKSSRKAWQLLRRLDSDPLVNPGHANVTPDQIAHQLIQNGKTNCSRIKMKINRVPELETHQLSSPLNLKELREAIKRCKTGKAPGLDDLMMEQIKHLGPKAENWLLKFYNQCLAHKQIPRAWRKTKIIAILKPGKDASNARNYRPISLLCHLYKVYERMLLNRLGPVIEPKLIAQQAGFRPGKNCTGQILHLTEHIEEGYEKGCITGTVFVDLTAAYDTVQHRKMLHKVYHITRDFDFTKTVQTLLENRSFYVEFQGQKSRWRRQKNGLPQGSVLAPTLFNIFTNDQPQPPLTKSFIYADDLGLTTQAKDFETVEKQLTNALKDLSSYYKENHLKPNPAKTQVCAFHLRNREANRKLKVTWEGQELEHCFHPKYLGVTLDRTLTYRKHCMNTKHKVAARNNILRKLTGSAWGADPQVIRTSALALSFSTAEYACPVWHKSAHAKQVRIALNETCRIITGCLKPTPVDKLYKLAGIAPPDVRREVAANGERKKVEHCESHPLHGYHPPPTRLKSRKGFMRTTTPLDVPPAAARVSLWAAKPGNSNWMAPQEGLPPGANQEWATWKSLNRLRSGVGRSKDNLARWHYLEESSTLCDCGAEQTTQHMYACPQCPASCTEEELFKATDNAVAVARFWSKTI

SEQ ID NO: 234 - protein, 982 aa, synthetic construct
MDEYQRSLSRPLLTIMSINIEGLSLAKEELLAKMSEDISCDILCIQETHRDITMRRPKILGMQLAVERPHRQYGSAIFVRSGVAISATSLTEVNNIEILSVELDSCTVSSLYKPPGADFYFTPPTSCHNHEAHFVVGDFNSHSCVWGYDEDDRNGEAVLTWADNSRMSLLHDSKLPPSFNSGRWKRGYNPDLIFVKESISHQCTKRVLNPIPNTQHRPICCVAYAAVRPKSVPFRRRFNFNKANWTKFTETLEAAISDIEPSIENYDLFVEAVKRSSRLSIPRGCRTSYLPGLNEESLNQLQEYLRLFQENPYSDGTIAAGQKLSTALANAKKDRWIELLENLDMSKSSRKAWQLLRRLDSDPLVNPGHANVTPDQIAHQLIQNGKTNCSRIKMKINRVPELETHQLSSPLNLKELREAIKRCKTRKAPGLDDLMMEQIKHLGPKAENWLLKFYNQCLAHKQIPRAWRKTKIIAILKPGKDASNARNYRPISLLCHLYKVYERMLLNRLGPVIEPKLIAQQAGFRPGKNCTGQILHLTEHIEEGYEKGCITGTVFVDLTAAYDTVQHRKMLHKVYHITRDFDFTKTVQTLLENRSFYVEFQGQKSRWRRQKNGLPQGSVLAPTLFNIFTNDQPQPPLTKSFIYADDLGLTTQAKDFETVEKQLTNALKDLSSYYKENHLKPNPAKTQVCAFHLRNREANRKLKVTWEGQELEHCFHPKYLGVTLDRTLTYRKHCMNTKHKVAARNNILRKLTGSAWGADPQVIRTSALALSFSTAEYACPVWHKSAHAKQVDIALNETCRIITGCLKPTPVDKLYKLAGIAPPDVRREVAANGERKKVEHCESHPLHGYHPPPTRLKSRKGFMRTTTPLDVPPAAARVSLWAAKPGNSNWMAPQEGLPPGANQEWATWKSLNRLRSGVGRSKDNLARWHYLEESSTLCDCGAEQTTQHMYACPQCPASCTEEELFKATDNAVAVARFWSKTI

SEQ ID NO: 235 - protein, 982 aa, synthetic construct
MDEYQRSLSRPLLTIMSINIEGLSLAKEELLAKMSEDISCDILCIQETHRDITMRRPKILGMQLAVERPHRQYGSAIFVRSGVAISATSLTEVNNIEILSVELDSCTVSSLYKPPGADFYFTPPTSCHNHEAHFVVGDFNSHSCVWGYDEDDRNGEAVLTWADNSRMSLLHDSKLPPSFNSGRWKRGYNPDLIFVKESISHQCTKRVLNPIPNTQHRPICCVAYAAVRPKSVPFRRRFNFNKANWTKFTETLEAAISDIEPSIENYDLFVEAVKRSSRLSIPRGCRTSYLPGLNEESLNQLQEYLRLFQENPYSDGTIAAGQKLSTALANAKKDRWIELLENLDMSKSSRKAWQLLRRLDSDPLVNPGHANVTPDQIAHQLIQNGKTNCSRIKMKINRVPELETHQLSSPLNLKELREAIKRCKTGKAPGLDDLMMEQIKHLGPKAENWLLKFYNQCLAHKQIPRAWRKTKIIAILKPGKDASNARNYRPISLLCHLYKVYERMLLNRLGPVIEPKLIAQQAGFRPGKNCTGQILHLTEHIEEGYEKGCITGTVFVDLTAAYDTVQHRKMLHKVYHITRDFDFTKTVQTLLENRSFYVEFQGQKSKWRRQKNGLPQGSVLAPTLFNIFTNDQPQPPLTKSFIYADDLGLTTQAKDFETVEKQLTNALKDLSSYYKENHLKPNPAKTQVCAFHLRNREANRKLKVTWEGQELEHCFHPKYLGVTLDRTLTYRKHCMNTKHKVAARNNILRKLTGSAWGADPQVIRTSALALSFSTAEYACPVWHKSAHAKQVDIALNETCRIITGCLKPTPVDKLYKLAGIAPPDVRREVAANGERKKVEHCESHPLHGYHPPPTRLKSRKGFMRTTTPLDVPPAAARVSLWAAKPGNSNWMAPQEGLPPGANQEWATWKSLNRLRSGVGRSKDNLARWHYLEESSTLCDCGAEQTTQHMYACPQCPASCTEEELFKATDNAVAVARFWSKTI

SEQ ID NO: 236 - protein, 982 aa, synthetic construct
MDEYQRSLSRPLLTIMSINIEGLSLAKEELLAKMSEDISCDILCIQETHRDITMRRPKILGMQLAVERPHRQYGSAIFVRSGVAISATSLTEVNNIEILSVELDSCTVSSLYKPPGADFYFTPPTSCHNHEAHFVVGDFNSHSCVWGYDEDDRNGEAVLTWADNSRMSLLHDSKLPPSFNSGRWKRGYNPDLIFVKESISHQCTKRVLNPIPNTQHRPICCVAYAAVRPKSVPFRRRFNFNKANWTKFTETLEAAISDIEPSIENYDLFVEAVKRSSRLSIPRGCRTSYLPGLNEESLNQLQEYLRLFQENPYSDGTIAAGQKLSTALANAKKDRWIELLENLDMSKSSRKAWQLLRRLDSDPLVNPGHANVTPDQIAHQLIQNGKTNCSRIKMKINRVPELETHQLSSPLNLKELREAIKRCKTGKAPGLDDLMMEQIKHLGPKAENWLLKFYNQCLAHKQIPRAWRKTKIIAILKPGKDASNARNYRPISLLCHLYKVYERMLLNRLGPVIEPKLIAQQAGFRPGKNCTGQILHLTEHIEEGYEKGCITGTVFVDLTAAYDTVQHRKMLHKVYHITRDFDFTKTVQTLLENRSFYVEFQGQKSRWRRQKNGLPQGSVLAPTLFNIFTNDQPQPPLTKSFIYADDLGLTTQAKDFETVEKQLTNALKDLSSYYKENHLKPNPAKTQVCAFHLRNREANRKLKVTWEGQELEHCFHPKYLGVTLDRTLTYRKHCMNTKKKVAARNNILRKLTGSAWGADPQVIRTSALALSFSTAEYACPVWHKSAHAKQVDIALNETCRIITGCLKPTPVDKLYKLAGIAPPDVRREVAANGERKKVEHCESHPLHGYHPPPTRLKSRKGFMRTTTPLDVPPAAARVSLWAAKPGNSNWMAPQEGLPPGANQEWATWKSLNRLRSGVGRSKDNLARWHYLEESSTLCDCGAEQTTQHMYACPQCPASCTEEELFKATDNAVAVARFWSKTI

SEQ ID NO: 237 - protein, 982 aa, synthetic construct
MDEYQRSLSRPLLTIMSINIEGLSLAKEELLAKMSEDISCDILCIQETHRDITMRRPKILGMQLAVERPHRQYGSAIFVRSGVAISATSLTEVNNIEILSVELDSCTVSSLYKPPGADFYFTPPTSCHNHEAHFVVGDFNSHSCVWGYDEDDRNGEAVLTWADNSRMSLLHDSKLPPSFNSGRWKRGYNPDLIFVKESISHQCTKRVLNPIPNTQHRPICCVAYAAVRPKSVPFRRRFNFNKANWTKFTETLEAAISDIEPSIENYDLFVEAVKRSSRLSIPRGCRTSYLPGLNEESLNQLQEYLRLFQENPYSDGTIAAGQKLSTALANAKKDRWIELLENLDMSKSSRKAWQLLRRLDSDPLVNPGHANVTPDQIAHQLIQNGKTNCSRIKMKINRVPELETHQLSSPLNLKELREAIKRCKTGKAPGLDDLMMEQIKHLGPKAENWLLKFYNQCLAHKQIPRAWRKTKIIAILKPGKDASNARNYRPISLLCHLYKVYERMLLNRLGPVIEPKLIAQQAGFRPGKNCTGQILHLTEHIEEGYEKGCITGTVFVDLTAAYDTVQHRKMLHKVYHITRDFDFTKTVQTLLENRSFYVEFQGQKSRWRRQKNGLPQGSVLAPTLFNIFTNDQPQPPLTKSFIYADDLGLTTQAKDFETVEKQLTNALKDLSSYYKENHLKPNPAKTQVCAFHLRNREANRKLKVTWEGQELEHCFHPKYLGVTLDRTLTYRKHCMNTKHKVAARNNILRKLTGSAWGADPQVIRTSALALCFSTAEYACPVWHKSAHAKQVDIALNETCRIITGCLKPTPVDKLYKLAGIAPPDVRREVAANGERKKVEHCESHPLHGYHPPPTRLKSRKGFMRTTTPLDVPPAAARVSLWAAKPGNSNWMAPQEGLPPGANQEWATWKSLNRLRSGVGRSKDNLARWHYLEESSTLCDCGAEQTTQHMYACPQCPASCTEEELFKATDNAVAVARFWSKTI

SEQ ID NO: 238 - protein, 982 aa, synthetic construct
MDEYQRSLSRPLLTIMSINIEGLSLAKEELLAKMSEDISCDILCIQETHRDITMRRPKILGMQLAVERPHRQYGSAIFVRSGVAISATSLTEVNNIEILSVELDSCTVSSLYKPPGADFYFTPPTSCHNHEAHFVVGDFNSHSCVWGYDEDDRNGEAVLTWADNSRMSLLNDSKLPPSFNSGRWKRGYNPDLIFVKESISHQCTKRVLNPIPNTQHRPICCVAYAAVRPKSVPFRRRFNFNKANWTKFTETLEAAISDIEPSIENYDLFVEAVKRSSRLSIPRGCRTSYLPGLNEESLNQLQEYLRLFQENPYSDGTIAAGQKLSTALANAKKDRWIELLENLDMSKSSRKAWQLLRRLDSDPLVNPGHANVTPDQIAHQLIQNGKTNCSRIKMKINRVPELETHQLSSPLNLKELREAIKRCKTGKAPGLDDLMMEQIKHLGPKAENWLLKFYNQCLAHKQIPRAWRKTKIIAILKPGKDASNARNYRPISLLCHLYKVYERMLLNRLGPVIEPKLIAQQAGFRPGKNCTGQILHLTEHIEEGYEKGCITGTVFVDLTAAYDTVQHRKMLHKVYHITRDFDFTKTVQTLLENRSFYVEFQGQKSRWRRQKNGLPQGSVLAPTLFNIFTNDQPQPPLTKSFIYADDLGLTTQAKDFETVEKQLTNALKDLSSYYKENHLKPNPAKTQVCAFHLRNREANRKLKVTWEGQELEHCFHPKYLGVTLDRTLTYRKHCMNTKHKVAARNNILRKLTGSAWGADPQVIRTSALALSFSTAEYACPVWHKSAHAKQVDIALNETCRIITGCLKPTPVDKLYKLAGIAPPDVRREVAANGERKKVEHCESHPLHGYHPPPTRLKSRKGFMRTTTPLDVPPAAARVSLWAAKPGNSNWMAPQEGLPPGANQEWATWKSLNRLRSGVGRSKDNLARWHYLEESSTLCDCGAEQTTQHMYACPQCPASCTEEELFKATDNAVAVARFWSKTI

SEQ ID NO: 239 - protein, 982 aa, synthetic construct
MDEYQRSLSRPLLTIMSINIEGLSLAKEELLAKMSEDISCDILCIQETHRDITMRRPKILGMQLAVERPHRQYGSAIFVRSGVAISATSLTEVNNIEILSVELDSCTVSSLYKPPGADFYFTPPTSCHNHEAHFVVGDFNSHSCVWGYDEDDRNGEAVLTWADNSRMSLLHDSKLPPSFNSGRWKRGYNPDLIFVKESISHQCTKRVLNPIPNTQHRPICCVAYAAVRPKSVPFRRRFNFNKANWTKFTETLEAAISDIEPSIENYDLFVEAVKRSSRLSIPRGCRTSYLPGLNEESLNQLQEYLRLFQENPYSDGTIAAGQKLSTALANAKKDRWIELLENLDMSKSSRKAWQLLRRLDSDPLVNPGHANVTPDQIAHQLIQNGKTNCSRIKMKINRVPELETHQLSSPLNLKELREAIKRCKTGKAPGLDDLMMEQIKHLGPKAENWLLKFYNQCLAHKQIPRAWRKTKIIAILKPGKDASNARNYRPISLLCHLYKVYERMLLNRLGPVIEPKLIAQQAGFRPGKNCTGQILHLTEHIEEGYEKGCITGTVFVDLTAAYDTVQHRKMLHKVYHITRDFDFTKTVQTLLENRSFYVEFQGQKSRWRRQKNGLPQGSVLAPTLFNIFTNDQPQPPLTKSFIYADDLGLTTQAKDFETVEKQLTNALKDLSSYYKENHLKPNPAKTQVCAFHLRNREANRKLKVTWEGQELEHCFHPKYLGVTLDRTLTYRKHCMNTKHKVAARNNILRKLTGSAWGADPQVIRTSALALSFSTAEYACPVWHKSAHAKQVDIALNETCRIITGCLKPTPVDKLYKLAGIAPPDVRREVAANGERKKVEHCESHPLHGYHPPPTRLKSRKGFMRTTTPLDVPPAAARVSLWAAKPGNSNWMAPQEGLPPGANQEWATWKSLNRLRSGVGRSKDNLARWRYLEESSTLCDCGAEQTTQHMYACPQCPASCTEEELFKATDNAVAVARFWSKTI

SEQ ID NO: 240 - protein, 982 aa, synthetic construct
MDEYQRSLSRPLLTIMSINIEGLSLAKEELLAKMSEDISCDILCIQETHRDITMRRPKILGMQLAVERPHRQYGSAIFVRSGVAISATSLTEVNNIEILSVELDSCTVSSLYKPPGADFYFTPPTSIHNHEAHFVVGDFNSHSCVWGYDEDDRNGEAVLTWADNSRMSLLHDSKLPPSFNSGRWKRGYNPDLIFVKESISHQCTKRVLNPIPNTQHRPICCVAYAAVRPKSVPFRRRFNFNKANWTKFTETLEAAISDIEPSIENYDLFVEAVKRSSRLSIPRGCRTSYLPGLNEESLNQLQEYLRLFQENPYSDGTIAAGQKLSTALANAKKDRWIELLENLDMSKSSRKAWQLLRRLDSDPLVNPGHANVTPDQIAHQLIQNGKTNCSRIKMKINRVPELETHQLSSPLNLKELREAIKRCKTGKAPGLDDLMMEQIKHLGPKAENWLLKFYNQCLAHKQIPRAWRKTKIIAILKPGKDASNARNYRPISLLCHLYKVYERMLLNRLGPVIEPKLIAQQAGFRPGKNCTGQILHLTEHIEEGYEKGCITGTVFVDLTAAYDTVQHRKMLHKVYHITRDFDFTKTVQTLLENRSFYVEFQGQKSRWRRQKNGLPQGSVLAPTLFNIFTNDQPQPPLTKSFIYADDLGLTTQAKDFETVEKQLTNALKDLSSYYKENHLKPNPAKTQVCAFHLRNREANRKLKVTWEGQELEHCFHPKYLGVTLDRTLTYRKHCMNTKHKVAARNNILRKLTGSAWGADPQVIRTSALALSFSTAEYACPVWHKSAHAKQVDIALNETCRIITGCLKPTPVDKLYKLAGIAPPDVRREVAANGERKKVEHCESHPLHGYHPPPTRLKSRKGFMRTTTPLDVPPAAARVSLWAAKPGNSNWMAPQEGLPPGANQEWATWKSLNRLRSGVGRSKDNLARWHYLEESSTLCDCGAEQTTQHMYACPQCPASCTEEELFKATDNAVAVARFWSKTI

SEQ ID NO: 241 - protein, 982 aa, synthetic construct
MDEYQRSLSRPLLTIMSINIEGLSLAKEELLAKMSEDISCDILCIQETHRDITMRRPKILGMQLAVERPHRQYGSAIFVRSGVAISATSLTEVNNIEILSVELDSCTVSSLYKPPGADFYFTPPTSCHNHEAHFVVGDFNSHSCVWGYDEDDRNGEAVLTWADNSRMSLLHDSKLPPSFNSGRWKRGYNPDLIFVKESISHQCTKRVLNPIPNTQHRPICCVAYAAVRPKSVPFRRRFNFNKANWTKFTETLEAAISDIEPSIENYDLFVEAVKRSSRLSIPRGCRTSYLPGLNEESLNQLQEYLRLFQENPYSDGTIAAGQKLSTALANAKKDRWIELLENLDMSKSSRKAWQLLRRLDSDPLVNPGHANVTPDQIAHQLIQNGKTNCSRIKMKINRVPELETHQLSSPLNLKELREAIKRCKTGKAPGLDDLMMEQIKHLGPKAENWLLKFYNQCLAHKQIPRAWRKTKIIAILKPGKDASNARNYRPISLLCHLYKVYERMLLNRLGPVIEPKLIAQQAGFRPGKNCTGQILHLTEHIEEGYEKGCITGTVFVDLTAAYDTVQHRKMLHKVYHITRDFDFTKTVQTLLENRSFYVEFQGQKSRWRRQKNGLPQGSVLAPTLFNIFTNDQPQPPNTKSFIYADDLGLTTQAKDFETVEKQLTNALKDLSSYYKENHLKPNPAKTQVCAFHLRNREANRKLKVTWEGQELEHCFHPKYLGVTLDRTLTYRKHCMNTKHKVAARNNILRKLTGSAWGADPQVIRTSALALSFSTAEYACPVWHKSAHAKQVDIALNETCRIITGCLKPTPVDKLYKLAGIAPPDVRREVAANGERKKVEHCESHPLHGYHPPPTRLKSRKGFMRTTTPLDVPPAAARVSLWAAKPGNSNWMAPQEGLPPGANQEWATWKSLNRLRSGVGRSKDNLARWHYLEESSTLCDCGAEQTTQHMYACPQCPASCTEEELFKATDNAVAVARFWSKTI

SEQ ID NO: 242 - protein, 982 aa, synthetic construct
MDEYQRSLSRPLLTIMSINIEGLSLAKEELLAKMSEDISCDILCIQETHRDITMRRPKILGMQLAVERPHRQYGSAIFVRSGVAISATSLTEVNNIEILSVELDSCTVSSLYKPPGADFYFTPPTSCHNHEAHFVVGDFNSHSCVWGYDEDDRNGEAVLTWADNSRMSLLHDSKLPPSFNSGRWKRGYNPDLIFVKESISHQCTKRVLNPIPNTQHRPICCVAYAAVRPKSVPFRRRFNFNKANWTKFTETLEAAISDIEPSIENYDLFVEAVKRSSRLSIPRGCRTSYLPGLNEESLNQLQEYLRLFQENPYSDGTIAAGQKLSTALANAKKDRWIELLENLDMSKSSRKAWQLLRRLDSDPLVNPGHANVTPDQIAHQLIQNGKTNCSRIKMKINRVPELETHQLSSPLNLKELREAIKRCKTGKAPGLDDLMMEQIKHLGPKAENWLLKFYNQCLAHKQIPRAWRKTKIIAILKPGKDASNARNYRPISLLCHLYKVYERMLLNRLGPVIEPKLIAQQAGFRPGKNCTGQILHLTEHIEEGYEKGCITGTVFVDLTAAYDTVQHRKMLHKVYHITRDFDFTKTVQTLLENRSFYVEFQGQKSRWRRQKNGLPQGSVLAPTLFNIFTNDQPQPPLTKSFIYADDLGLTTQAKDFETVEKQLTNALKDLSSYYKENHLKPNPAKTQVCAFHLRNREANRKLKVTWEGQELEHCFHPKYLGVTLDRTLTYKKHCMNTKHKVAARNNILRKLTGSAWGADPQVIRTSALALSFSTAEYACPVWHKSAHAKQVDIALNETCRIITGCLKPTPVDKLYKLAGIAPPDVRREVAANGERKKVEHCESHPLHGYHPPPTRLKSRKGFMRTTTPLDVPPAAARVSLWAAKPGNSNWMAPQEGLPPGANQEWATWKSLNRLRSGVGRSKDNLARWHYLEESSTLCDCGAEQTTQHMYACPQCPASCTEEELFKATDNAVAVARFWSKTI

SEQ ID NO: 243 - protein, 982 aa, synthetic construct
MDEYQRSLSRPLLTIMSINIEGLSLAKEELLAKMSEDISCDILCIQETHRDITMRRPKILGMQLAVERPHRQYGSAIFVRSGVAISATSLTEVNNIEILSVELDSCTVSSLYKPPGADFYFTPPTSCHNHEAHFVVGDFNSHSCVWGYDEDDRNGEAVLTWADNSRMSLLHDSKLPPSFNSGRWKRGYNPDLIFVKESISHQCTKRVLNPIPNTQHRPICCVAYAAVRPKSVPFRRRFNFNKANWTKFTETLEAAISDIEPSIENYDLFVEAVKRSSRLSIPRGCRTSYLPGLNEESLNQLQEYLRLFQENPYSDGTIAAGQKLSTALANAKKDRWIELLENLDMSKSSRKAWQLLRRLDSDPLVNPGHANVTPDQIAHQLIQNGKTNCSRIKMKINRVPELETHQLSSPLNLKELREAIKRCKTGKAPGLDDLMMEQIKHLGPKAENWLLKFYNQCLAHKQIPRAWRKTKIIAILKPGKDASNARNYRPISLLCHLYKVYERMLLNRLGPVIEPKLIAQQAGFRPGKNCTGQILHLTEHIEEGYEKGCITGTVFVDLTAAYDTVQHRKMLHKVYHITRDFDFTKTVQTLLENRSFYVEFQGQKSRWRRQKNGLPQGSVLAPTLFNIFTNDQPQPPLTKSFIYADDLGLTTQAKDFETVEKQLTNALKDLSSYYKENHLKPNPAKTQVCAFHLRNREANRKLKVTWEGQELEHCFHPKYLGVTLDRTLTYRKHCMNTKHKVAARNNILRKLTGTAWGADPQVIRTSALALSFSTAEYACPVWHKSAHAKQVDIALNETCRIITGCLKPTPVDKLYKLAGIAPPDVRREVAANGERKKVEHCESHPLHGYHPPPTRLKSRKGFMRTTTPLDVPPAAARVSLWAAKPGNSNWMAPQEGLPPGANQEWATWKSLNRLRSGVGRSKDNLARWHYLEESSTLCDCGAEQTTQHMYACPQCPASCTEEELFKATDNAVAVARFWSKTI

SEQ ID NO: 244 - protein, 982 aa, synthetic construct
MDEYQRSLSRPLLTIMSINIEGLSLAKEELLAKMSEDISCDILCIQETHRDITMRRPKILGMQLAVERPHRQYGSAIFVRSGVAISATSLTEVNNIEILSVELDSCTVSSLYKPPGADFYFTPPTSCHNHEAHFVVGDFNSHSCVWGYDEDDRNGEAVLTWADNSRMSLLHDSKLPPSFNSGRWKRGYNPDLIFVKESISHQCTKRVLNPIPNTQHRPICCVAYAAVRPKSVPFRRRFNFNKANWTKFTETLEAAISDIEPSIENYDLFVEAVKRSSRLSIPRGCRTSYLPGLNEESLNQLQEYLRLFQENPYSDGTIAAGQKLSTALANAKKDRWIELLENLDMSKSSRKAWQLLRRLDSDPLVNPGHANVTPDQIAHQLIQNGKTNCSRIKMKINRVPELETHQLSSPLNLKELREAIKRCKTGKAPGLDDLMMEQIKHLGPKAENWLLKFYNQCLAHKQIPRAWRKTKIIAILKPGKDASNARNYRPISLLCHLYKVYERMLLNRLGPVIEPKLIAQQAGFRPGKNCTGQILHLTEHIEEGYEKGCITGTVFVDLTAAYDTVQHRKMLHKVYHITRDFDFTKTVQTLLENRSFYVEFQGQKSRWRRQKNGLPQGSVLAPTLFNIFTNDQPQPPLTKSFIYADDLGLTTQAKDFETVEKQLTNALKDLSSYYKENHLKPNPAKTQVCAFHLRNREANRKLKVTWEGQELEHCFHPKYLGVTLDRTLTYRKHCMNTKHKVAARNNILRKLTGSAWGADPQVIRTSALALSFSTAEYACPVWHKSAHAKKVDIALNETCRIITGCLKPTPVDKLYKLAGIAPPDVRREVAANGERKKVEHCESHPLHGYHPPPTRLKSRKGFMRTTTPLDVPPAAARVSLWAAKPGNSNWMAPQEGLPPGANQEWATWKSLNRLRSGVGRSKDNLARWHYLEESSTLCDCGAEQTTQHMYACPQCPASCTEEELFKATDNAVAVARFWSKTI

SEQ ID NO: 245 - protein, 982 aa, synthetic construct
MDEYQRSLSRPLLTIMSINIEGLSLAKEELLAKMSEDISCDILCIQETHRDITMRRPKILGMQLAVERPHRQYGSAIFVRSGVAISATSLTEVNNIEILSVELDSCTVSSLYKPPGADFYFTPPTSCHNHEAHFVVGDFNSHSCVWGYDEDDRNGEAVLTWADNSRMSLLHDSKLPPSFNSGRWKRGYNPDLIFVKESISHQCTKRVLNPIPNTQHRPICCVAYAAVRPKSVPFRRRFNFNKANWTKFTETLEAAISDIEPSIENYDLFVEAVKRSSRLSIPRGCRTSYLPGLNEESLNQLQEYLRLFQENPYSDGTIAAGQKLSTALANAKKDRWIELLENLDMSKSSRKAWQLLRRLDSDPLVNPGHANVTPDQIAHQLIQNGKTNCSRIKMKINRVPELETHQLSSPLNLKELREAIKRCKTGKAPGLDDLMMEQIKHLGPKAENWLLKFYNQCLAHKQIPRAWRKTKIIAILKPGKDASNARNYRPISLLCHLYKVYERMLLNRLGPVIEPKLIAQQAGFRPGKNCTGQILHLTEHIEEGYEKGCITGTVFVDLTAAYDTVQHRKMLHKVYHITRDFDFTKTVQTLLENRSFYVEFQGQKSRWRRQKNGLPQGSVLAPTLFNIFTNDQPQPPLTKSFIYADDLGLTTQAKDFETVEKQLTNALKDLSSYYKENHLKPNPAKTQVCAFHLRNREANRKLKVTWEGQELEHCFHPKYLGVTLDRTLTYRKHCMNTKHKVAARNNILRKLTGSAWGADPQVIRTSALALSFSTAEYACPVWHKSAHAKQVDIALNETCRIITGCLKPTPVDKLYKLAGIAPPDVRREVAANGERKKVEHCESHPLHGYHPPPTRLKSRKGFMRTTTPLDVPPAAARVSLWAAKPGNSNWMAPQEGLPPGANQEWATWKSLNRLRSGVGRSKDNLAKWHYLEESSTLCDCGAEQTTQHMYACPQCPASCTEEELFKATDNAVAVARFWSKTI

SEQ ID NO: 246 - protein, 99 aa, synthetic construct
PKRKVSSAEGAAKEEPKRRSARLSAKPPAKVEAKPKKAAAKDKSSDKKVQTKGKRGAKGKQAEVANQETKEDLPAENGETKTEESPASDEAGEKEAKSD

SEQ ID NO: 247 - DNA, 7109 bp, synthetic construct
  source 1..7109: mol_type = other DNA
tcgcgcgtttcggtgatgacggtgaaaacctctgacacatgcagctcccggagacggtcacagcttgtctgtaagcggatgccgggagcagacaagcccgtcagggcgcgtcagcgggtgttggcgggtgtcggggctggcttaactatgcggcatcagagcagattgtactgagagtgcaccatatgcggtgtgaaataccgcacagatgcgtaaggagaaaataccgcatcaggcgccattcgccattcaggctgcgcaactgttgggaagggcgatcggtgcgggcctcttcgctattacgccagctggcgaaagggggatgtgctgcaaggcgattaagttgggtaacgccagggttttcccagtcacgacgttgtaaaacgacggccagtgaattggagatcggtacttcgcgaatgcgtcgagattgcagggtcgactaatacgactcactataagggaaataagagagaaaagaagagtaagaagaaatataagagaattcgccaccatggtgaaacggacagccgacggaagcgagttcgagtcacctaagagaaaggtgtccagcgccgagggcgctgccaaggaagagcctaaacggagaagcgccagactgagcgccaagccccccgccaaggtggaagccaagcctaagaaggccgccgctaaggacaagagcagcgataagaaagtccagaccaagggcaagcggggcgccaaaggcaaacaggccgaggtggccaaccaggagacaaaggaagatctgcctgctgagaacggcgaaaccaagaccgaggaatctccagcttctgacgaggccggagagaaggaggccaaaagcgacagcggctctgagacacctggaacaagcgagagcgccaccccggaatccacaataatctcaatcaacatcgaaggcatgtcagctgccaaagaacagctgctttatgaactgtgccgagataagaaatgtgacgtgctgtgtgtccaagaaacacacagggataaacaacagaaacgaccaaaagtcccaggaatgatcttagtggcagaaagaccacatgcgcagtatggaagcgctgtctttgtcaaaccaggcctccaagtcagcagtgtccataacaccgaagaaaacaatatagaggttataacagtagagcttaataacatcacaattacctctgtctacaaacccccaaatgaagagttttgtttctcctctccagagaactttgatagtcaccaaaggactgtagtaattggtgactttaacagccatagccacgtatggggctatgctcaggaggataaaaatggagaggctgtcctttcctgggctgaactgcataaactatcgcttattcacgatagtaagctcccaccatcctacaacagtgggagatggcaccgaggatataacccagacctcctatttgtgagcgacagcattgtgcagcaatgctctaaatcagtgggaccaccaataccaaacacacagcatcggccaatagtatgccaattgttcccaaccataaggcctctggaagttcgatttaaacgaagattcaacttcagaaaggcagattggtccaaattctcagacatgctagatgacaagatcatatcggtcgccccaatccctgaggaatacgagcgctttatcaaaatagtaaaaacctgctcacgggcctctataccgagaggctgcagaacacactaccttcagggcattactcctgatacagctgccttgctggaggactactacaggctccacaatgaggacccatttagtgagcaaactctccagacagcgcagagcattctgtcctccatctctgaagccaagaaagaacagtggataaagctgataacagaagtcgacatgggcaggagcagtcagaaggcatggaggctgttaagacggctgagcaatgatccctcacaaactaacacccatgccaacataaaggcagatcagatagcgcatcaacttctgaagaatgggaaacccaaactctccaccaaagtaggaaggaaaccaatagtcagacaaccagataatgagaacaaccaccttcatgaaccttttacatctactgaattggacatggccctcaataaatgtaaaaatggcaaagcagctggcctggacgatctacggatggaacaaattaagaactttggcccaaaagcaaggtgctggctgctgaagatgatgaacaactgcattgcatcctgtcagattcccaaaatctggcggaaagcaagagtcatagccatcttgaaaccaggtaaagaccgtaatgacccaaaaagctatagaccaatctccttgttgtgccatctttacaaagttctggagagacttattttgaatagaattatggaaaaaatagacccatgtttgattccggagcaagctggcttcaggaaaggcaaaagctgcacatcacaagtgttgaacctgactcagcacatagaagatgggtttgaaaggcagcagattacaggagctgtctttatagacctgtcagcagcttatgacactgtaaaccatcgccttctcctgagaaaaacttataatatcacaaaggactaccacctcacccgcttcataggaaatctgctacaaaacaggagcttttttgttgaattccagggtcagagaagcagatggcgaaaacagaagaacggcctccctcaggggagcgtgcttgctccatcaatgtttaacatttacacaaatgaccagccactgccagaagggacagagagtttcatctatgctgacgatcgtgccatcaccgcccaagcagggagctttgaaatggttgaacagaagctctccgaagctttaggtgctcttactgcctattacagggaaaaccagctgatccctaatccatctaaaacacagacgtgtgctttccaccttaagaacagacaagcatctcgagctctgaggattacctgggaaggaatcccactggagcattgcagcacaccaaaatacttgggagttaccctggaccgtgctctgacttacaagaagcactgctttactatcaagcaaaaagtgggcgctagaaataacatcgtacgaaagctgactggcacaacctggggatcacaacctgacacagtgaggacatctgcccttgcgctttgctactctgctgctgaatacgcatgcccagtgtggaatacatctcaccacgttaaaacagtggatgtggctcttaatgagacatgccgcattatcacaggatgtctacgtcctacaccactggagaaattatactgcttagccggcattgcaccacctgacatctgccgggaagtagcagccaacaatgaaaggaccaaggcattgacatctccggcccatcccctgtttggatatcagccagcacgccaacgccttaaatcaagaaatagctttctaagatctacagagatactcgcaggaacacctcagcaagcgagagtccaaaagtggcaggctaaaacccggaaccttaatcagtggctgacgccggatgagagacttccccctgggcacacagaggactgggcgacttggaaggcgctgaacagactgcgctctggcaccacgagatgcagagccaaccttaagaaatggggctacaaagtggagtccgcaacatgcgactgtggagaagagcaaaccacagaccacctactgcaatgcattctgagccctgctacatgcacaatggaggaccttctaacagcaacaccagaggcactccaagtggccagctactgggcaaaagacatttccggctccgagactcctggaacaagcgagagcgctacacctgagggcagcgaaagcacagtcggccctgcttgccccccaggaagaaccgtgaccaagcggccctgggccctggccgaggacacccctaggggccccgatagcccccccaaaagaccccggcctaacagcctgcctctgaccacaacattcagacctctgcctcctccacctcagaccaccagcgccgtggaccctagcagccactcccctgtgaacccccctcgggaccagcacgccacagataccgccgacgagaagcccagagccgcttctccagccctgagcgacgccagcggacctcctacccctgacatccccctgtctcctggcggcacccacgccagagatcctgatgctgatcctgactctccagacctggacagctccggctccgagactcctggaacaagcgagagcgctacacctgagggaaaaggcgaccccaagaaacctagaggcaagatgagcagctacgcctttttcgtgcagacctgtcgggaagagcacaagaaaaagcaccctgacgccagcgtgaacttctctgagttcagcaagaagtgcagcgagagatggaaaacaatgtccgccaaggaaaagggcaagttcgaggacatggccaaggctgataaggccagatacgagcgggaaatgaaaacctacatcccacctaagggcgagggcggatctggcaaaagaaccgctgatggcagcgagttcgagagccccaagaaaaagagaaaggtgtaagctgccttctgcggggcttgccttctggccatgcccttcttctctcccttgcacctgtacctcttggtctttgaataaagcctgagtaggaagggatccaaaaaaaaaaaaaaaaaaaaaaaaaaaaaaaacgttgactaaaaaaaaaaaaaaaaaaaaaaaaaaaaaaaaaaaaaaaaaaaaaaaaaaaaaaaaaaaaaaaaaaaaaaaaaagcgtcttcgcgcgcatcatcggatgccgggaccgacgagtgcagaggcgtgcaagcgagcttggcgtaatcatggtcatagctgtttcctgtgtgaaattgttatccgctcacaattccacacaacatacgagccggaagcataaagtgtaaagcctggggtgcctaatgagtgagctaactcacattaattgcgttgcgctcactgcccgctttccagtcgggaaacctgtcgtgccagctgcattaatgaatcggccaacgcgcggggagaggcggtttgcgtattgggcgctcttccgcttcctcgctcactgactcgctgcgctcggtcgttcggctgcggcgagcggtatcagctcactcaaaggcggtaatacggttatccacagaatcaggggataacgcaggaaagaacatgtgagcaaaaggccagcaaaaggccaggaaccgtaaaaaggccgcgttgctggcgtttttccataggctccgcccccctgacgagcatcacaaaaatcgacgctcaagtcagaggtggcgaaacccgacaggactataaagataccaggcgtttccccctggaagctccctcgtgcgctctcctgttccgaccctgccgcttaccggatacctgtccgcctttctcccttcgggaagcgtggcgctttctcatagctcacgctgtaggtatctcagttcggtgtaggtcgttcgctccaagctgggctgtgtgcacgaaccccccgttcagcccgaccgctgcgccttatccggtaactatcgtcttgagtccaacccggtaagacacgacttatcgccactggcagcagccactggtaacaggattagcagagcgaggtatgtaggcggtgctacagagttcttgaagtggtggcctaactacggctacactagaagaacagtatttggtatctgcgctctgctgaagccagttaccttcggaaaaagagttggtagctcttgatccggcaaacaaaccaccgctggtagcggtggtttttttgtttgcaagcagcagattacgcgcagaaaaaaaggatctcaagaagatcctttgatcttttctacggggtctgacgctcagtggaacgaaaactcacgttaagggattttggtcatgagattatcaaaaaggatcttcacctagatccttttaaattaaaaatgaagttttaaatcaatctaaagtatatatgagtaaacttggtctgacagttaccaatgcttaatcagtgaggcacctatctcagcgatctgtctatttcgttcatccatagttgcctgactccccgtcgtgtagataactacgatacgggagggcttaccatctggccccagtgctgcaatgataccgcgagacccacgctcaccggctccagatttatcagcaataaaccagccagccggaagggccgagcgcagaagtggtcctgcaactttatccgcctccatccagtctattaattgttgccgggaagctagagtaagtagttcgccagttaatagtttgcgcaacgttgttgccattgctacaggcatcgtggtgtcacgctcgtcgtttggtatggcttcattcagctccggttcccaacgatcaaggcgagttacatgatcccccatgttgtgcaaaaaagcggttagctccttcggtcctccgatcgttgtcagaagtaagttggccgcagtgttatcactcatggttatggcagcactgcataattctcttactgtcatgccatccgtaagatgcttttctgtgactggtgagtactcaaccaagtcattctgagaatagtgtatgcggcgaccgagttgctcttgcccggcgtcaatacgggataataccgcgccacatagcagaactttaaaagtgctcatcattggaaaacgttcttcggggcgaaaactctcaaggatcttaccgctgttgagatccagttcgatgtaacccactcgtgcacccaactgatcttcagcatcttttactttcaccagcgtttctgggtgagcaaaaacaggaaggcaaaatgccgcaaaaaagggaataagggcgacacggaaatgttgaatactcatactcttcctttttcaatattattgaagcatttatcagggttattgtctcatgagcggatacatatttgaatgtatttagaaaaataaacaaataggggttccgcgcacatttccccgaaaagtgccacctgacgtctaagaaaccattattatcatgacattaacctataaaaataggcgtatcacgaggccctttcgtc

SEQ ID NO: 248 - protein, 727 aa, synthetic construct
MDEYQRSLSRPLLTIMSINIEGLSLAKEELLAKMSEDISCDILCIQETHRDITMRRPKILGMQLAVERPHRQYGSAIFVRSGVAISATSLTEVNNIEILSVELDSCTVSSLYKPPGADFYFTPPTSCHNHEAHFVVGDFNSHSCVWGYDEDDRNGEAVLTWADNSRMSLLHDSKLPPSFNSGRWKRGYNPDLIFVKESISHQCTKRVLNPIPNTQHRPICCVAYAAVRPKSVPFRRRFNFNKANWTKFTETLEAAISDIEPSIENYDLFVEAVKRSSRLSIPRGCRTSYLPGLNEESLNQLQEYLRLFQENPYSDGTIAAGQKLSTALANAKKDRWIELLENLDMSKSSRKAWQLLRRLDSDPLVNPGHANVTPDQIAHQLIQNGKTNCSRIKMKINRVPELETHQLSSPLNLKELREAIKRCKTGKAPGLDDLMMEQIKHLGPKAENWLLKFYNQCLAHKQIPRAWRKTKIIAILKPGKDASNARNYRPISLLCHLYKVYERMLLNRLGPVIEPKLIAQQAGFRPGKNCTGQILHLTEHIEEGYEKGCITGTVFVDLTAAYDTVQHRKMLHKVYHITRDFDFTKTVQTLLENRSFYVEFQGQKSRWRRQKNGLPQGSVLAPTLFNIFTNDQPQPPLTKSFIYADDLGLTTQAKDFETVEKQLTNALKDLSSYYKENHLKPNPAKTQVCAFHLRNREANRKLKVTWEGQELEHCFHPKYLGVTLDRT

SEQ ID NO: 249 - protein, 1361 aa, synthetic construct
MVKRTADGSEFESPKRKVSSAEGAAKEEPKRRSARLSAKPPAKVEAKPKKAAAKDKSSDKKVQTKGKRGAKGKQAEVANQETKEDLPAENGETKTEESPASDEAGEKEAKSDSGSETPGTSESATPESTIISINIEGMSAAKEQLLYELCRDKKCDVLCVQETHRDKQQKRPKVPGMILVAERPHAQYGSAVFVKPGLQVSSVHNTEENNIEVITVELNNITITSVYKPPNEEFCFSSPENFDSHQRTVVIGDFNSHSHVWGYAQEDKNGEAVLSWAELHKLSLIHDSKLPPSYNSGRWHRGYNPDLLFVSDSIVQQCSKSVGPPIPNTQHRPIVCQLFPTIRPLEVRFKRRFNFRKADWSKFSDMLDDKIISVAPIPEEYERFIKIVKTCSRASIPRGCRTHYLQGITPDTAALLEDYYRLHNEDPFSEQTLQTAQSILSSISEAKKEQWIKLITEVDMGRSSQKAWRLLRRLSNDPSQTNTHANIKADQIAHQLLKNGKPKLSTKVGRKPIVRQPDNENNHLHEPFTSTELDMALNKCKNGKAAGLDDLRMEQIKNFGPKARCWLLKMMNNCIASCQIPKIWRKARVIAILKPGKDRNDPKSYRPISLLCHLYKVLERLILNRIMEKIDPCLIPEQAGFRKGKSCTSQVLNLTQHIEDGFERQQITGAVFIDLSAAYDTVNHRLLLRKTYNITKDYHLTRFIGNLLQNRSFFVEFQGQRSRWRKQKNGLPQGSVLAPSMFNIYTNDQPLPEGTESFIYADDRAITAQAGSFEMVEQKLSEALGALTAYYRENQLIPNPSKTQTCAFHLKNRQASRALRITWEGIPLEHCSTPKYLGVTLDRALTYKKHCFTIKQKVGARNNIVRKLTGTTWGSQPDTVRTSALALCYSAAEYACPVWNTSHHVKTVDVALNETCRIITGCLRPTPLEKLYCLAGIAPPDICREVAANNERTKALTSPAHPLFGYQPARQRLKSRNSFLRSTEILAGTPQQARVQKWQAKTRNLNQWLTPDERLPPGHTEDWATWKALNRLRSGTTRCRANLKKWGYKVESATCDCGEEQTTDHLLQCILSPATCTMEDLLTATPEALQVASYWAKDISGSETPGTSESATPEGSESTVGPACPPGRTVTKRPWALAEDTPRGPDSPPKRPRPNSLPLTTTFRPLPPPPQTTSAVDPSSHSPVNPPRDQHATDTADEKPRAASPALSDASGPPTPDIPLSPGGTHARDPDADPDSPDLDSSGSETPGTSESATPEGKGDPKKPRGKMSSYAFFVQTCREEHKKKHPDASVNFSEFSKKCSERWKTMSAKEKGKFEDMAKADKARYEREMKTYIPPKGEGGSGKRTADGSEFESPKKKRKV

SEQ ID NO: 250 - protein, 1036 aa, synthetic construct
MDEYQRSLSRPLLTIMSINIEGLSLAKEELLAKMSEDISCDILCIQETHRDITMRRPKILGMQLAVERPHRQYGSAIFVRSGVAISATSLTEVNNIEILSVELDSCTVSSLYKPPGADFYFTPPTSCHNHEAHFVVGDFNSHSCVWGYDEDDRNGEAVLTWADNSRMSLLHDSKLPPSFNSGRWKRGYNPDLIFVKESISHQCTKRVLNPIPNTQHRPICCVAYAAVRPKSVPFRRRFNFNKANWTKFTETLEAAISDIEPSIENYDLFVEAVKRSSRLSIPRGCRTSYLPGLNEESLNQLQEYLRLFQENPYSDGTIAAGQKLSTALANAKKDRWIELLENLDMSKSSRKAWQLLRRLDSDPLVNPGHANVTPDQIAHQLIQNGKTNCSRIKMKINRVPELETHQLSSPLNLKELREAIKRCKTGKAPGLDDLMMEQIKHLGPKAENWLLKFYNQCLAHKQIPRAWRKTKIIAILKPGKDASNARNYRPISLLCHLYKVYERMLLNRLGPVIEPKLIAQQAGFRPGKNCTGQILHLTEHIEEGYEKGCITGTVFVDLTAAYDTVQHRKMLHKVYHITRDFDFTKTVQTLLENRSFYVEFQGQKSRWRRQKNGLPQGSVLAPTLFNIFTNDQPQPPLTKSFIYADDLGLTTQAKDFETVEKQLTNALKDLSSYYKENHLKPNPAKTQVCAFHLRNREANRKLKVTWEGQELEHCFHPKYLGVTLDRTLTYRKHCMNTKHKVAARNNILRKLTGSAWGADPQVIRTSALALSFSTAEYACPVWHKSAHAKQVDIALNETCRIITGCLKPTPVDKLYKLAGIAPPDVRREVAANGERKKVEHCESHPLHGYHPPPTRLKSRKGFMRTTTPLDVPPAAARVSLWAAKPGNSNWMAPQEGLPPGANQEWATWKSLNRLRSGVGRSKDNLARWHYLEESSTLCDCGAEQTTQHMYACPQCPASCTEEELFKATDNAVAVARFWSKTISGSETPGTSESATPEGSSTQGRLDDFFKVTGSLGGSGKRTADGSEFEPKKKRKV

SEQ ID NO: 251 - protein, 982 aa, synthetic construct
MDEYQRSLSRPLLTIMSINIEGLSLAKEELLAKMSEDISCDILCIQETHRDITMRRPKILGMQLAVERPHRQYGSAIFVRSGVAISATSLTEVNNIEILSVELDSCTVSSLYKPPGADFYFTPPTSCHNHEAHFVVGDFNSHSCVWGYDEDDRNGEAVLTWADNSRMSLLHDSKLPPSFNSGRWKRGYNPDLIFVKESISHQCTKRVLNPIPNTQHRPICCVAYAAVRPKSVPFRRRFNFNKANWTKFTETLEAAISDIEPSIENYDLFVEAVKRSSRLSIPRGCRTSYLPGLNEESLNQLQEYLRLFQENPYSDGTIAAGQKLRKRRQTSMTDFYHSKRRLIFSKRKPRKAWQLLRRLDSDPLVNPGHANVTPDQIAHQLIQNGKTNCSRIKMKINRVPELETHQLSSPLNLKELREAIKRCKTGKAPGLDDLMMEQIKHLGPKAENWLLKFYNQCLAHKQIPRAWRKTKIIAILKPGKDASNARNYRPISLLCHLYKVYERMLLNRLGPVIEPKLIAQQAGFRPGKNCTGQILHLTEHIEEGYEKGCITGTVFVDLTAAYDTVQHRKMLHKVYHITRDFDFTKTVQTLLENRSFYVEFQGQKSRWRRQKNGLPQGSVLAPTLFNIFTNDQPQPPLTKSFIYADDLGLTTQAKDFETVEKQLTNALKDLSSYYKENHLKPNPAKTQVCAFHLRNREANRKLKVTWEGQELEHCFHPKYLGVTLDRTLTYRKHCMNTKHKVAARNNILRKLTGSAWGADPQVIRTSALALSFSTAEYACPVWHKSAHAKQVDIALNETCRIITGCLKPTPVDKLYKLAGIAPPDVRREVAANGERKKVEHCESHPLHGYHPPPTRLKSRKGFMRTTTPLDVPPAAARVSLWAAKPGNSNWMAPQEGLPPGANQEWATWKSLNRLRSGVGRSKDNLARWHYLEESSTLCDCGAEQTTQHMYACPQCPASCTEEELFKATDNAVAVARFWSKTI

SEQ ID NO: 252 - protein, 1248 aa, synthetic construct
MDEYQRSLSRPLLTIMSINIEGLSLAKEELLAKMSEDISCDILCIQETHRDITMRRPKILGMQLAVERPHRQYGSAIFVRSGVAISATSLTEVNNIEILSVELDSCTVSSLYKPPGADFYFTPPTSCHNHEAHFVVGDFNSHSCVWGYDEDDRNGEAVLTWADNSRMSLLHDSKLPPSFNSGRWKRGYNPDLIFVKESISHQCTKRVLNPIPNTQHRPICCVAYAAVRPKSVPFRRRFNFNKANWTKFTETLEAAISDIEPSIENYDLFVEAVKRSSRLSIPRGCRTSYLPGLNEESLNQLQEYLRLFQENPYSDGTIAAGQKLSTALANAKKDRWIELLENLDMSKSSRKAWQLLRRLDSDPLVNPGHANVTPDQIAHQLIQNGKTNCSRIKMKINRVPELETHQLSSPLNLKELREAIKRCKTGKAPGLDDLMMEQIKHLGPKAENWLLKFYNQCLAHKQIPRAWRKTKIIAILKPGKDASNARNYRPISLLCHLYKVYERMLLNRLGPVIEPKLIAQQAGFRPGKNCTGQILHLTEHIEEGYEKGCITGTVFVDLTAAYDTVQHRKMLHKVYHITRDFDFTKTVQTLLENRSFYVEFQGQKSRWRRQKNGLPQGSVLAPTLFNIFTNDQPQPPLTKSFIYADDLGLTTQAKDFETVEKQLTNALKDLSSYYKENHLKPNPAKTQVCAFHLRNREANRKLKVTWEGQELEHCFHPKYLGVTLDRTLTYRKHCMNTKHKVAARNNILRKLTGSAWGADPQVIRTSALALSFSTAEYACPVWHKSAHAKQVDIALNETCRIITGCLKPTPVDKLYKLAGIAPPDVRREVAANGERKKVEHCESHPLHGYHPPPTRLKSRKGFMRTTTPLDVPPAAARVSLWAAKPGNSNWMAPQEGLPPGANQEWATWKSLNRLRSGVGRSKDNLARWHYLEESSTLCDCGAEQTTQHMYACPQCPASCTEEELFKATDNAVAVARFWSKTISGSETPGTSESATPEGSKLSKDTTALLKNFATINSGIMLKSGQFIMTRAVNGTTYAEANISDVIDFDVAIYDLNGFLGILSLVNDDAEISQSEDGNIKIADARSTIFWPAADPSTVVAPNKPIPFPVASAVTEIKAEDLQQLLRVSRGLQIDTIAITVKEGKIVINGFNKVEDSALTRVKYSLTLGDYDGENTFNFIINMANMKMQPGNYKLLLWAKGKQGAAKFEGEHANYVVALEADSTHDFGGSGKRTADGSEFESPKKKRKV

SEQ ID NO: 253 - protein, 1068 aa, synthetic construct
MDEYQRSLSRPLLTIMSINIEGLSLAKEELLAKMSEDISCDILCIQETHRDITMRRPKILGMQLAVERPHRQYGSAIFVRSGVAISATSLTEVNNIEILSVELDSCTVSSLYKPPGADFYFTPPTSCHNHEAHFVVGDFNSHSCVWGYDEDDRNGEAVLTWADNSRMSLLHDSKLPPSFNSGRWKRGYNPDLIFVKESISHQCTKRVLNPIPNTQHRPICCVAYAAVRPKSVPFRRRFNFNKANWTKFTETLEAAISDIEPSIENYDLFVEAVKRSSRLSIPRGCRTSYLPGLNEESLNQLQEYLRLFQENPYSDGTIAAGQKLSTALANAKKDRWIELLENLDMSKSSRKAWQLLRRLDSDPLVNPGHANVTPDQIAHQLIQNGKTNCSRIKMKINRVPELETHQLSSPLNLKELREAIKRCKTGKAPGLDDLMMEQIKHLGPKAENWLLKFYNQCLAHKQIPRAWRKTKIIAILKPGKDASNARNYRPISLLCHLYKVYERMLLNRLGPVIEPKLIAQQAGFRPGKNCTGQILHLTEHIEEGYEKGCITGTVFVDLTAAYDTVQHRKMLHKVYHITRDFDFTKTVQTLLENRSFYVEFQGQKSRWRRQKNGLPQGSVLAPTLFNIFTNDQPQPPLTKSFIYADDLGLTTQAKDFETVEKQLTNALKDLSSYYKENHLKPNPAKTQVCAFHLRNREANRKLKVTWEGQELEHCFHPKYLGVTLDRTLTYRKHCMNTKHKVAARNNILRKLTGSAWGADPQVIRTSALALSFSTAEYACPVWHKSAHAKQVDIALNETCRIITGCLKPTPVDKLYKLAGIAPPDVRREVAANGERKKVEHCESHPLHGYHPPPTRLKSRKGFMRTTTPLDVPPAAARVSLWAAKPGNSNWMAPQEGLPPGANQEWATWKSLNRLRSGVGRSKDNLARWHYLEESSTLCDCGAEQTTQHMYACPQCPASCTEEELFKATDNAVAVARFWSKTIGSATVKFKYKGEEKEVDISKIKKVWRVGKMISFTYDEGGGKTGRGAVSEKDAPKELLQMLEKQKKGGSGKRTADGSEFEPKKKRKV

SEQ ID NO: 254 - protein, 1040 aa, synthetic construct
MDEYQRSLSRPLLTIMSINIEGLSLAKEELLAKMSEDISCDILCIQETHRDITMRRPKILGMQLAVERPHRQYGSAIFVRSGVAISATSLTEVNNIEILSVELDSCTVSSLYKPPGADFYFTPPTSCHNHEAHFVVGDFNSHSCVWGYDEDDRNGEAVLTWADNSRMSLLHDSKLPPSFNSGRWKRGYNPDLIFVKESISHQCTKRVLNPIPNTQHRPICCVAYAAVRPKSVPFRRRFNFNKANWTKFTETLEAAISDIEPSIENYDLFVEAVKRSSRLSIPRGCRTSYLPGLNEESLNQLQEYLRLFQENPYSDGTIAAGQKLSTALANAKKDRWIELLENLDMSKSSRKAWQLLRRLDSDPLVNPGHANVTPDQIAHQLIQNGKTNCSRIKMKINRVPELETHQLSSPLNLKELREAIKRCKTGKAPGLDDLMMEQIKHLGPKAENWLLKFYNQCLAHKQIPRAWRKTKIIAILKPGKDASNARNYRPISLLCHLYKVYERMLLNRLGPVIEPKLIAQQAGFRPGKNCTGQILHLTEHIEEGYEKGCITGTVFVDLTAAYDTVQHRKMLHKVYHITRDFDFTKTVQTLLENRSFYVEFQGQKSRWRRQKNGLPQGSVLAPTLFNIFTNDQPQPPLTKSFIYADDLGLTTQAKDFETVEKQLTNALKDLSSYYKENHLKPNPAKTQVCAFHLRNREANRKLKVTWEGQELEHCFHPKYLGVTLDRTLTYRKHCMNTKHKVAARNNILRKLTGSAWGADPQVIRTSALALSFSTAEYACPVWHKSAHAKQVDIALNETCRIITGCLKPTPVDKLYKLAGIAPPDVRREVAANGERKKVEHCESHPLHGYHPPPTRLKSRKGFMRTTTPLDVPPAAARVSLWAAKPGNSNWMAPQEGLPPGANQEWATWKSLNRLRSGVGRSKDNLARWHYLEESSTLCDCGAEQTTQHMYACPQCPASCTEEELFKATDNAVAVARFWSKTISGSETPGTSESATPEGSVKHHMYVSGGSQLIHLYYFDGGSGKRTADGSEFEPKKKRKV

SEQ ID NO: 255 - protein, 1080 aa, synthetic construct
MDEYQRSLSRPLLTIMSINIEGLSLAKEELLAKMSEDISCDILCIQETHRDITMRRPKILGMQLAVERPHRQYGSAIFVRSGVAISATSLTEVNNIEILSVELDSCTVSSLYKPPGADFYFTPPTSCHNHEAHFVVGDFNSHSCVWGYDEDDRNGEAVLTWADNSRMSLLHDSKLPPSFNSGRWKRGYNPDLIFVKESISHQCTKRVLNPIPNTQHRPICCVAYAAVRPKSVPFRRRFNFNKANWTKFTETLEAAISDIEPSIENYDLFVEAVKRSSRLSIPRGCRTSYLPGLNEESLNQLQEYLRLFQENPYSDGTIAAGQKLSTALANAKKDRWIELLENLDMSKSSRKAWQLLRRLDSDPLVNPGHANVTPDQIAHQLIQNGKTNCSRIKMKINRVPELETHQLSSPLNLKELREAIKRCKTGKAPGLDDLMMEQIKHLGPKAENWLLKFYNQCLAHKQIPRAWRKTKIIAILKPGKDASNARNYRPISLLCHLYKVYERMLLNRLGPVIEPKLIAQQAGFRPGKNCTGQILHLTEHIEEGYEKGCITGTVFVDLTAAYDTVQHRKMLHKVYHITRDFDFTKTVQTLLENRSFYVEFQGQKSRWRRQKNGLPQGSVLAPTLFNIFTNDQPQPPLTKSFIYADDLGLTTQAKDFETVEKQLTNALKDLSSYYKENHLKPNPAKTQVCAFHLRNREANRKLKVTWEGQELEHCFHPKYLGVTLDRTLTYRKHCMNTKHKVAARNNILRKLTGSAWGADPQVIRTSALALSFSTAEYACPVWHKSAHAKQVDIALNETCRIITGCLKPTPVDKLYKLAGIAPPDVRREVAANGERKKVEHCESHPLHGYHPPPTRLKSRKGFMRTTTPLDVPPAAARVSLWAAKPGNSNWMAPQEGLPPGANQEWATWKSLNRLRSGVGRSKDNLARWHYLEESSTLCDCGAEQTTQHMYACPQCPASCTEEELFKATDNAVAVARFWSKTISGSETPGTSESATPEGSVTVKFKYKGEEKEVDISKIKKVWRVGKMISFTYDDNGKTGRGAVSEKDAPKELLQMLEKGGSGKRTADGSEFESPKKKRKV

SEQ ID NO: 256 - protein, 1367 aa, synthetic construct
MDEYQRSLSRPLLTIMSINIEGLSLAKEELLAKMSEDISCDILCIQETHRDITMRRPKILGMQLAVERPHRQYGSAIFVRSGVAISATSLTEVNNIEILSVELDSCTVSSLYKPPGADFYFTPPTSCHNHEAHFVVGDFNSHSCVWGYDEDDRNGEAVLTWADNSRMSLLHDSKLPPSFNSGRWKRGYNPDLIFVKESISHQCTKRVLNPIPNTQHRPICCVAYAAVRPKSVPFRRRFNFNKANWTKFTETLEAAISDIEPSIENYDLFVEAVKRSSRLSIPRGCRTSYLPGLNEESLNQLQEYLRLFQENPYSDGTIAAGQKLSTALANAKKDRWIELLENLDMSKSSRKAWQLLRRLDSDPLVNPGHANVTPDQIAHQLIQNGKTNCSRIKMKINRVPELETHQLSSPLNLKELREAIKRCKTGKAPGLDDLMMEQIKHLGPKAENWLLKFYNQCLAHKQIPRAWRKTKIIAILKPGKDASNARNYRPISLLCHLYKVYERMLLNRLGPVIEPKLIAQQAGFRPGKNCTGQILHLTEHIEEGYEKGCITGTVFVDLTAAYDTVQHRKMLHKVYHITRDFDFTKTVQTLLENRSFYVEFQGQKSRWRRQKNGLPQGSVLAPTLFNIFTNDQPQPPLTKSFIYADDLGLTTQAKDFETVEKQLTNALKDLSSYYKENHLKPNPAKTQVCAFHLRNREANRKLKVTWEGQELEHCFHPKYLGVTLDRTLTYRKHCMNTKHKVAARNNILRKLTGSAWGADPQVIRTSALALSFSTAEYACPVWHKSAHAKQVDIALNETCRIITGCLKPTPVDKLYKLAGIAPPDVRREVAANGERKKVEHCESHPLHGYHPPPTRLKSRKGFMRTTTPLDVPPAAARVSLWAAKPGNSNWMAPQEGLPPGANQEWATWKSLNRLRSGVGRSKDNLARWHYLEESSTLCDCGAEQTTQHMYACPQCPASCTEEELFKATDNAVAVARFWSKTISGSETPGTSESATPEGSGIHGVPAAAMQMQLEANADTSVEEESFGPQPISRLEQCGINANDVKKLEEAGFHTVEAVAYAPKKELINIKGISEAKADKILAEAAKLVPMGFTTETEFHQRRSEIIQITTGSKELDKLLQGGIETGSITEMFGEFRTGKTQICHTLAVTCQLPIDRGGGEGKAMYIDTEGTFRPERLLAVAERYGLSGSDVLDNVAYARAFNTDHQTQLLYQASAMMVESRYALLIVDSATALYRTDYSGRGELSARQMHLARFLRMLLRLADEFGVAVVITNQVVAQVDGAAMFAADPKKPIGGNIIAHASTTRLYLRKGRGETRICKIYDSPCLPEAEAMFAINADGVGDAKDGGSGKRTADGSEFESPKKKRKV

SEQ ID NO: 257 - protein, 752 aa, synthetic construct
MVPFRRRFNFNKANWTKFTETLEAAISDIEPSIENYDLFVEAVKRSSRLSIPRGCRTSYLPGLNEESLNQLQEYLRLFQENPYSDGTIAAGQKLSTALANAKKDRWIELLENLDMSKSSRKAWQLLRRLDSDPLVNPGHANVTPDQIAHQLIQNGKTNCSRIKMKINRVPELETHQLSSPLNLKELREAIKRCKTGKAPGLDDLMMEQIKHLGPKAENWLLKFYNQCLAHKQIPRAWRKTKIIAILKPGKDASNARNYRPISLLCHLYKVYERMLLNRLGPVIEPKLIAQQAGFRPGKNCTGQILHLTEHIEEGYEKGCITGTVFVDLTAAYDTVQHRKMLHKVYHITRDFDFTKTVQTLLENRSFYVEFQGQKSRWRRQKNGLPQGSVLAPTLFNIFTNDQPQPPLTKSFIYADDLGLTTQAKDFETVEKQLTNALKDLSSYYKENHLKPNPAKTQVCAFHLRNREANRKLKVTWEGQELEHCFHPKYLGVTLDRTLTYRKHCMNTKHKVAARNNILRKLTGSAWGADPQVIRTSALALSFSTAEYACPVWHKSAHAKQVDIALNETCRIITGCLKPTPVDKLYKLAGIAPPDVRREVAANGERKKVEHCESHPLHGYHPPPTRLKSRKGFMRTTTPLDVPPAAARVSLWAAKPGNSNWMAPQEGLPPGANQEWATWKSLNRLRSGVGRSKDNLARWHYLEESSTLCDCGAEQTTQHMYACPQCPASCTEEELFKATDNAVAVARFWSKTI

SEQ ID NO: 258 - protein, 900 aa, synthetic construct
MDEYQRSLSRPLLTIMSINIEGLSLAKEELLAKMSEDISCDILCIQETHRDITMRRPKILGMQLAVERPHRQYGSAIFVRSGVAISATSLTEVNNIEILSVELDSCTVSSLYKPPGADFYFTPPTSCHNHEAHFVVGDFNSHSCVWGYDEDDRNGEAVLTWADNSRMSLLHDSKLPPSFNSGRWKRGYNPDLIFVKESISHQCTKRVLNPIPNTQHRPICCVAYAAVRPKSVPFRRRFNFNKANWTKFTETLEAAISDIEPSIENYDLFVEAVKRSSRLSIPRGCRTSYLPGLNEESLNQLQEYLRLFQENPYSDGTIAAGQKLSTALANAKKDRWIELLENLDMSKSSRKAWQLLRRLDSDPLVNPGHANVTPDQIAHQLIQNGKTNCSRIKMKINRVPELETHQLSSPLNLKELREAIKRCKTGKAPGLDDLMMEQIKHLGPKAENWLLKFYNQCLAHKQIPRAWRKTKIIAILKPGKDASNARNYRPISLLCHLYKVYERMLLNRLGPVIEPKLIAQQAGFRPGKNCTGQILHLTEHIEEGYEKGCITGTVFVDLTAAYDTVQHRKMLHKVYHITRDFDFTKTVQTLLENRSFYVEFQGQKSRWRRQKNGLPQGSVLAPTLFNIFTNDQPQPPLTKSFIYADDLGLTTQAKDFETVEKQLTNALKDLSSYYKENHLKPNPAKTQVCAFHLRNREANRKLKVTWEGQELEHCFHPKYLGVTLDRTLTYRKHCMNTKHKVAARNNILRKLTGSAWGADPQVIRTSALALSFSTAEYACPVWHKSAHAKQVDIALNETCRIITGCLKPTPVDKLYKLAGIAPPDVRREVAANGERKKVEHCESHPLHGYHPPPTRLKSRKGFMRTTTPLDVPPAAARVSLWAAKPGNSNWMAPQEGLPPG

SEQ ID NO: 259 - protein, 2400 aa, synthetic construct
MKRTADGSEFESPKKKRKVDKKYSIGLAIGTNSVGWAVITDEYKVPSKKFKVLGNTDRHSIKKNLIGALLFDSGETAEATRLKRTARRRYTRRKNRICYLQEIFSNEMAKVDDSFFHRLEESFLVEEDKKHERHPIFGNIVDEVAYHEKYPTIYHLRKKLVDSTDKADLRLIYLALAHMIKFRGHFLIEGDLNPDNSDVDKLFIQLVQTYNQLFEENPINASGVDAKAILSARLSKSRRLENLIAQLPGEKKNGLFGNLIALSLGLTPNFKSNFDLAEDAKLQLSKDTYDDDLDNLLAQIGDQYADLFLAAKNLSDAILLSDILRVNTEITKAPLSASMIKRYDEHHQDLTLLKALVRQQLPEKYKEIFFDQSKNGYAGYIDGGASQEEFYKFIKPILEKMDGTEELLVKLNREDLLRKQRTFDNGSIPHQIHLGELHAILRRQEDFYPFLKDNREKIEKILTFRIPYYVGPLARGNSRFAWMTRKSEETITPWNFEEVVDKGASAQSFIERMTNFDKNLPNEKVLPKHSLLYEYFTVYNELTKVKYVTEGMRKPAFLSGEQKKAIVDLLFKTNRKVTVKQLKEDYFKKIECFDSVEISGVEDRFNASLGTYHDLLKIIKDKDFLDNEENEDILEDIVLTLTLFEDREMIEERLKTYAHLFDDKVMKQLKRRRYTGWGRLSRKLINGIRDKQSGKTILDFLKSDGFANRNFMQLIHDDSLTFKEDIQKAQVSGQGDSLHEHIANLAGSPAIKKGILQTVKVVDELVKVMGRHKPENIVIEMARENQTTQKGQKNSRERMKRIEEGIKELGSQILKEHPVENTQLQNEKLYLYYLQNGRDMYVDQELDINRLSDYDVDAIVPQSFLKDDSIDNKVLTRSDKNRGKSDNVPSEEVVKKMKNYWRQLLNAKLITQRKFDNLTKAERGGLSELDKAGFIKRQLVETRQITKHVAQILDSRMNTKYDENDKLIREVKVITLKSKLVSDFRKDFQFYKVREINNYHHAHDAYLNAVVGTALIKKYPKLESEFVYGDYKVYDVRKMIAKSEQEIGKATAKYFFYSNIMNFFKTEITLANGEIRKRPLIETNGETGEIVWDKGRDFATVRKVLSMPQVNIVKKTEVQTGGFSKESILPKRNSDKLIARKKDWDPKKYGGFDSPTVAYSVLVVAKVEKGKSKKLKSVKELLGITIMERSSFEKNPIDFLEAKGYKEVKKDLIIKLPKYSLFELENGRKRMLASAGELQKGNELALPSKYVNFLYLASHYEKLKGSPEDNEQKQLFVEQHKHYLDEIIEQISEFSKRVILADANLDKVLSAYNKHRDKPIREQAENIIHLFTLTNLGAPAAFKYFDTTIDRKRYTSTKEVLDATLIHQSITGLYETRIDLSQLGGDSGGSSGGSSGSETPGTSESATPESSGGSSGGSSDEYQRSLSRPLLTIMSINIEGLSLAKEELLAKMSEDISCDILCIQETHRDITMRRPKILGMQLAVERPHRQYGSAIFVRSGVAISATSLTEVNNIEILSVELDSCTVSSLYKPPGADFYFTPPTSCHNHEAHFVVGDFNSHSCVWGYDEDDRNGEAVLTWADNSRMSLLHDSKLPPSFNSGRWKRGYNPDLIFVKESISHQCTKRVLNPIPNTQHRPICCVAYAAVRPKSVPFRRRFNFNKANWTKFTETLEAAISDIEPSIENYDLFVEAVKRSSRLSIPRGCRTSYLPGLNEESLNQLQEYLRLFQENPYSDGTIAAGQKLSTALANAKKDRWIELLENLDMSKSSRKAWQLLRRLDSDPLVNPGHANVTPDQIAHQLIQNGKTNCSRIKMKINRVPELETHQLSSPLNLKELREAIKRCKTGKAPGLDDLMMEQIKHLGPKAENWLLKFYNQCLAHKQIPRAWRKTKIIAILKPGKDASNARNYRPISLLCHLYKVYERMLLNRLGPVIEPKLIAQQAGFRPGKNCTGQILHLTEHIEEGYEKGCITGTVFVDLTAAYDTVQHRKMLHKVYHITRDFDFTKTVQTLLENRSFYVEFQGQKSRWRRQKNGLPQGSVLAPTLFNIFTNDQPQPPLTKSFIYADDLGLTTQAKDFETVEKQLTNALKDLSSYYKENHLKPNPAKTQVCAFHLRNREANRKLKVTWEGQELEHCFHPKYLGVTLDRTLTYRKHCMNTKHKVAARNNILRKLTGSAWGADPQVIRTSALALSFSTAEYACPVWHKSAHAKQVDIALNETCRIITGCLKPTPVDKLYKLAGIAPPDVRREVAANGERKKVEHCESHPLHGYHPPPTRLKSRKGFMRTTTPLDVPPAAARVSLWAAKPGNSNWMAPQEGLPPGANQEWATWKSLNRLRSGVGRSKDNLARWHYLEESSTLCDCGAEQTTQHMYACPQCPASCTEEELFKATDNAVAVARFWSKTI

SEQ ID NO: 260 - DNA, 6518 bp, synthetic construct
  source 1..6518: mol_type = other DNA
tcgcgcgtttcggtgatgacggtgaaaacctctgacacatgcagctcccggagacggtcacagcttgtctgtaagcggatgccgggagcagacaagcccgtcagggcgcgtcagcgggtgttggcgggtgtcggggctggcttaactatgcggcatcagagcagattgtactgagagtgcaccatatgcggtgtgaaataccgcacagatgcgtaaggagaaaataccgcatcaggcgccattcgccattcaggctgcgcaactgttgggaagggcgatcggtgcgggcctcttcgctattacgccagctggcgaaagggggatgtgctgcaaggcgattaagttgggtaacgccagggttttcccagtcacgacgttgtaaaacgacggccagtgaattggagatcggtacttcgcgagtttaaactaatacgactcactataagggggggacacggaaagagcctccccgaagattgagtgaattcagtcgggcgtcccctgggcaacgtttcttgtaagcggccgatctttccaccccaaaagcattggatgaatggatgaataccaaaggtctttatcaagaccattgctaacgattatgtctattaatatagaaggtttgtcacttgctaaggaagaactattagccaaaatgtctgaggacatctcgtgtgacatcctatgtatacaggaaacacacagagacatcacaatgaggagaccaaaaattcttggaatgcaactggcagtggaacgacctcacagacaatatggcagtgccatttttgtacgatctggtgtagcaatctctgcaacttccctcacagaagtgaacaacattgaaatcttatctgtggaacttgatagttgcaccgtatcatcactctataaaccacctggggctgatttctattttacacccccaaccagttgccacaatcatgaagcccattttgttgtgggagatttcaatagccacagctgtgtctggggctatgacgaagatgatagaaatggcgaagcagttctaacgtgggccgacaatagtagaatgagcctccttcatgacagtaaattaccaccatcatttaatagcggccgatggaagcgtggttataaccctgatctgatttttgtaaaggaaagcataagccaccaatgcaccaaaagggtattaaacccaatacctaacacacaacacagaccaatatgctgcgtagcatatgcagctgtaagaccgaaaagtgtcccattccgcagaagatttaacttcaataaagctaactggacaaagtttacagagaccttggaagctgctatttctgatatagaaccttctatagaaaattatgacctgttcgtagaagctgtgaaaagatcctcaaggctctcaatccctagaggctgtcgcacaagctacctaccaggcctaaacgaagaatcactaaatcagctacaagaatatctcagattatttcaagagaacccatacagtgatgggactatagcagcaggccaaaaactatctacagccttagctaatgctaagaaagaccgttggatagagctgcttgagaacctggacatgtccaagagtagccgaaaagcctggcaattgctgagacgcctggatagtgaccctctggtcaaccctggacacgcgaacgtgacaccagatcagatagctcaccagctaattcagaatgggaaaaccaactgcagcagaataaagatgaaaatcaacagggtgccagaacttgaaacccaccagttgtcctctcctctaaacctgaaagaactcagagaagccatcaagcgatgtaagactggtaaagcacctggcctagatgacctgatgatggagcaaatcaaacacttggggcccaaagctgaaaactggcttttgaaattctacaatcaatgcctggcacacaaacagattcccagagcatggaggaaaactaagataattgccatcttaaaacctggtaaagatgcctccaatgccaggaactatcgaccaatctccctcttatgtcatctatataaagtctatgagaggatgctattaaatcgactaggacctgttatcgaacccaagcttattgcacaacaagcaggtttcagaccagggaaaaactgtacaggtcaaattcttcatctgactgaacatatcgaggaaggctatgagaaaggctgcattacgggaacagtctttgtggaccttacggcagcctatgacacggtgcaacatagaaaaatgctgcataaagtctaccatatcacccgggactttgactttacaaaaactgtccagaccctcttagaaaaccgcagcttctatgtggagtttcagggccagaaaagcagatggaggaggcaaaagaatggtttaccccaaggcagcgttcttgcaccaaccttatttaacatcttcacgaacgatcagccacaaccaccactcacaaagagctttatatatgctgatgaccttggccttacaacacaagcaaaagattttgaaacagttgaaaagcaactcaccaatgccttgaaagatctctccagctactacaaagagaaccacctgaagcctaaccctgccaagacacaagtgtgtgctttccacctacgtaaccgcgaagccaacaggaaactgaaagttacttgggaaggccaagagctcgaacactgtttccatcctaaataccttggtgtcaccttagaccgaacactaacatataggaaacactgcatgaacaccaagcacaaagtagctgcacgcaataacatcctgcggaaactgactggcagcgcatggggagcagacccacaagtaataagaacatcagccctggccttgtctttctcaactgcagagtatgcctgtcctgtttggcacaagtctgcccatgcaaagcaggtggacatagcactgaatgaaacatgcagaatcatcacgggatgccttaaacctacacctgttgataaactctacaagttagctggcattgcccctcctgacgtgcgacgggaagttgctgctaacggtgagagaaaaaaggtcgaacattgtgaaagccacccactgcatggctatcaccctcctcccaccagactcaaatcaaggaagggcttcatgagaaccaccactcctcttgatgttcctccagcagcagcaagggtgtccctctgggcagctaaacctggcaattctaactggatggccccccaagagggacttcctccaggggcaaaccaagaatgggcaacttggaagtccctgaacagactcagaagtggagtgggcagatcaaaagacaacttggcaaggtggcactacctggaggaatcctccaccttgtgtgactgtggagctgaacaaacaactcagcatatgtatgcttgcccacaatgccctgcctcatgtacggaggaggagttgtttaaagctacagacaatgcggttgctgttgcccgcttttggtccaaaactatttagtcgacaatcaacctctggattacaaaatttgtgaaagattgactggtattcttaactatgttgctccttttacgctatgtggatacgctgctttaatgcctttgtatcatgctattgcttcccgtatggctttcattttctcctccttgtataaatcctggttgctgtctctttatgaggagttgtggcccgttgtcaggcaacgtggcgtggtgtgcactgtgtttgctgacgcaacccccactggttggggcattgccaccacctgtcagctcctttccgggactttcgctttccccctccctattgccacggcggaactcatcgccgcctgccttgcccgctgctggacaggggctcggctgttgggcactgacaattccgtggtgttgtcggggaagctgacgtcctttccatggctgctcgcctgtgttgccacctggattctgcgcgggacgtccttctgctacgtcccttcggccctcaatccagcggaccttccttcccgcggcctgctgccggctctgcggcctcttccgcctcttcgccttcgccctcagacgagtcggatctccctttgggccgcctccccgcctgaccggtaaaaaaaaaaaaaaaaaaaaaaaaaaaaaaaacgttgactaaaaaaaaaaaaaaaaaaaaaaaaaaaaaaaaaaaaaaaaaaaaaaaaaaaaaaaaaaaaaaaaaaaaaaaaaaaagtcttcgcgcgcatcatcggatgccgggaccgacgagtgcagaggcgtgcaagcgagcttggcgtaatcatggtcatagctgtttcctgtgtgaaattgttatccgctcacaattccacacaacatacgagccggaagcataaagtgtaaagcctggggtgcctaatgagtgagctaactcacattaattgcgttgcgctcactgcccgctttccagtcgggaaacctgtcgtgccagctgcattaatgaatcggccaacgcgcggggagaggcggtttgcgtattgggcgctcttccgcttcctcgctcactgactcgctgcgctcggtcgttcggctgcggcgagcggtatcagctcactcaaaggcggtaatacggttatccacagaatcaggggataacgcaggaaagaacatgtgagcaaaaggccagcaaaaggccaggaaccgtaaaaaggccgcgttgctggcgtttttccataggctccgcccccctgacgagcatcacaaaaatcgacgctcaagtcagaggtggcgaaacccgacaggactataaagataccaggcgtttccccctggaagctccctcgtgcgctctcctgttccgaccctgccgcttaccggatacctgtccgcctttctcccttcgggaagcgtggcgctttctcatagctcacgctgtaggtatctcagttcggtgtaggtcgttcgctccaagctgggctgtgtgcacgaaccccccgttcagcccgaccgctgcgccttatccggtaactatcgtcttgagtccaacccggtaagacacgacttatcgccactggcagcagccactggtaacaggattagcagagcgaggtatgtaggcggtgctacagagttcttgaagtggtggcctaactacggctacactagaagaacagtatttggtatctgcgctctgctgaagccagttaccttcggaaaaagagttggtagctcttgatccggcaaacaaaccaccgctggtagcggtggtttttttgtttgcaagcagcagattacgcgcagaaaaaaaggatctcaagaagatcctttgatcttttctacggggtctgacgctcagtggaacgaaaactcacgttaagggattttggtcatgagattatcaaaaaggatcttcacctagatccttttaaattaaaaatgaagttttaaatcaatctaaagtatatatgagtaaacttggtctgacagttaccaatgcttaatcagtgaggcacctatctcagcgatctgtctatttcgttcatccatagttgcctgactccccgtcgtgtagataactacgatacgggagggcttaccatctggccccagtgctgcaatgataccgcgggacccacgctcaccggctccagatttatcagcaataaaccagccagccggaagggccgagcgcagaagtggtcctgcaactttatccgcctccatccagtctattaattgttgccgggaagctagagtaagtagttcgccagttaatagtttgcgcaacgttgttgccattgctacaggcatcgtggtgtcacgctcgtcgtttggtatggcttcattcagctccggttcccaacgatcaaggcgagttacatgatcccccatgttgtgcaaaaaagcggttagctccttcggtcctccgatcgttgtcagaagtaagttggccgcagtgttatcactcatggttatggcagcactgcataattctcttactgtcatgccatccgtaagatgcttttctgtgactggtgagtactcaaccaagtcattctgagaatagtgtatgcggcgaccgagttgctcttgcccggcgtcaatacgggataataccgcgccacatagcagaactttaaaagtgctcatcattggaaaacgttcttcggggcgaaaactctcaaggatcttaccgctgttgagatccagttcgatgtaacccactcgtgcacccaactgatcttcagcatcttttactttcaccagcgtttctgggtgagcaaaaacaggaaggcaaaatgccgcaaaaaagggaataagggcgacacggaaatgttgaatactcatactcttcctttttcaatattattgaagcatttatcagggttattgtctcatgagcggatacatatttgaatgtatttagaaaaataaacaaataggggttccgcgcacatttccccgaaaagtgccacctgacgtctaagaaaccattattatcatgacattaacctataaaaataggcgtatcacgaggccctttcgtc

SEQ ID NO: 261 - DNA, 6015 bp, synthetic construct
  source 1..6015: mol_type = other DNA
tcgcgcgtttcggtgatgacggtgaaaacctctgacacatgcagctcccggagacggtcacagcttgtctgtaagcggatgccgggagcagacaagcccgtcagggcgcgtcagcgggtgttggcgggtgtcggggctggcttaactatgcggcatcagagcagattgtactgagagtgcaccatatgcggtgtgaaataccgcacagatgcgtaaggagaaaataccgcatcaggcgccattcgccattcaggctgcgcaactgttgggaagggcgatcggtgcgggcctcttcgctattacgccagctggcgaaagggggatgtgctgcaaggcgattaagttgggtaacgccagggttttcccagtcacgacgttgtaaaacgacggccagtgaattggagatcggtacttcgcgagtttaaactaatacgactcactataagggggggacacggaaagagcctccccgaagattgagtgaattcagtcgggcgtcccctgggcaacgtttcttgtaagcggccgatctttccaccccaaaagcattggatgaatggatgaataccaaaggtctttatcaagaccattgctaacgattatgtctattaatatagaaggtttgtcacttgctaaggaagaactattagccaaaatgtctgaggacatctcgtgtgacatcctatgtatacaggaaacacacagagacatcacaatgaggagaccaaaaattcttggaatgcaactggcagtggaacgacctcacagacaatatggcagtgccatttttgtacgatctggtgtagcaatctctgcaacttccctcacagaagtgaacaacattgaaatcttatctgtggaacttgatagttgcaccgtatcatcactctataaaccacctggggctgatttctattttacacccccaaccagttgccacaatcatgaagcccattttgttgtgggagatttcaatagccacagctgtgtctggggctatgacgaagatgatagaaatggcgaagcagttctaacgtgggccgacaatagtagaatgagcctccttcatgacagtaaattaccaccatcatttaatagcggccgatggaagcgtggttataaccctgatctgatttttgtaaaggaaagcataagccaccaatgcaccaaaagggtattaaacccaatacctaacacacaacacagaccaatatgctgcgtagcatatgcagctgtaagaccgaaaagtgtcccattccgcagaagatttaacttcaataaagctaactggacaaagtttacagagaccttggaagctgctatttctgatatagaaccttctatagaaaattatgacctgttcgtagaagctgtgaaaagatcctcaaggctctcaatccctagaggctgtcgcacaagctacctaccaggcctaaacgaagaatcactaaatcagctacaagaatatctcagattatttcaagagaacccatacagtgatgggactatagcagcaggccaaaaactatctacagccttagctaatgctaagaaagaccgttggatagagctgcttgagaacctggacatgtccaagagtagccgaaaagcctggcaattgctgagacgcctggatagtgaccctctggtcaaccctggacacgcgaacgtgacaccagatcagatagctcaccagctaattcagaatgggaaaaccaactgcagcagaataaagatgaaaatcaacagggtgccagaacttgaaacccaccagttgtcctctcctctaaacctgaaagaactcagagaagccatcaagcgatgtaagactggtaaagcacctggcctagatgacctgatgatggagcaaatcaaacacttggggcccaaagctgaaaactggcttttgaaattctacaatcaatgcctggcacacaaacagattcccagagcatggaggaaaactaagataattgccatcttaaaacctggtaaagatgcctccaatgccaggaactatcgaccaatctccctcttatgtcatctatataaagtctatgagaggatgctattaaatcgactaggacctgttatcgaacccaagcttattgcacaacaagcaggtttcagaccagggaaaaactgtacaggtcaaattcttcatctgactgaacatatcgaggaaggctatgagaaaggctgcattacgggaacagtctttgtggaccttacggcagcctatgacacggtgcaacatagaaaaatgctgcataaagtctaccatatcacccgggactttgactttacaaaaactgtccagaccctcttagaaaaccgcagcttctatgtggagtttcagggccagaaaagcagatggaggaggcaaaagaatggtttaccccaaggcagcgttcttgcaccaaccttatttaacatcttcacgaacgatcagccacaaccaccactcacaaagagctttatatatgctgatgaccttggccttacaacacaagcaaaagattttgaaacagttgaaaagcaactcaccaatgccttgaaagatctctccagctactacaaagagaaccacctgaagcctaaccctgccaagacacaagtgtgtgctttccacctacgtaaccgcgaagccaacaggaaactgaaagttacttgggaaggccaagagctcgaacactgtttccatcctaaataccttggtgtcaccttagaccgaacactaacatataggaaacactgcatgaacaccaagcacaaagtagctgcacgcaataacatcctgcggaaactgactggcagcgcatggggagcagacccacaagtaataagaacatcagccctggccttgtctttctcaactgcagagtatgcctgtcctgtttggcacaagtctgcccatgcaaagcaggtggacatagcactgaatgaaacatgcagaatcatcacgggatgccttaaacctacacctgttgataaactctacaagttagctggcattgcccctcctgacgtgcgacgggaagttgctgctaacggtgagagaaaaaaggtcgaacattgtgaaagccacccactgcatggctatcaccctcctcccaccagactcaaatcaaggaagggcttcatgagaaccaccactcctcttgatgttcctccagcagcagcaagggtgtccctctgggcagctaaacctggcaattctaactggatggccccccaagagggacttcctccaggggcaaaccaagaatgggcaacttggaagtccctgaacagactcagaagtggagtgggcagatcaaaagacaacttggcaaggtggcactacctggaggaatcctccaccttgtgtgactgtggagctgaacaaacaactcagcatatgtatgcttgcccacaatgccctgcctcatgtacggaggaggagttgtttaaagctacagacaatgcggttgctgttgcccgcttttggtccaaaactatttaggctgccttctgcggggcttgccttctggccatgcccttcttctctcccttgcacctgtacctcttggtctttgaataaagcctgagtaggaagcaccggtaaaaaaaaaaaaaaaaaaaaaaaaaaaaaaaacgttgactaaaaaaaaaaaaaaaaaaaaaaaaaaaaaaaaaaaaaaaaaaaaaaaaaaaaaaaaaaaaaaaaaaaaaaaaaaaagtcttcgcgcgcatcatcggatgccgggaccgacgagtgcagaggcgtgcaagcgagcttggcgtaatcatggtcatagctgtttcctgtgtgaaattgttatccgctcacaattccacacaacatacgagccggaagcataaagtgtaaagcctggggtgcctaatgagtgagctaactcacattaattgcgttgcgctcactgcccgctttccagtcgggaaacctgtcgtgccagctgcattaatgaatcggccaacgcgcggggagaggcggtttgcgtattgggcgctcttccgcttcctcgctcactgactcgctgcgctcggtcgttcggctgcggcgagcggtatcagctcactcaaaggcggtaatacggttatccacagaatcaggggataacgcaggaaagaacatgtgagcaaaaggccagcaaaaggccaggaaccgtaaaaaggccgcgttgctggcgtttttccataggctccgcccccctgacgagcatcacaaaaatcgacgctcaagtcagaggtggcgaaacccgacaggactataaagataccaggcgtttccccctggaagctccctcgtgcgctctcctgttccgaccctgccgcttaccggatacctgtccgcctttctcccttcgggaagcgtggcgctttctcatagctcacgctgtaggtatctcagttcggtgtaggtcgttcgctccaagctgggctgtgtgcacgaaccccccgttcagcccgaccgctgcgccttatccggtaactatcgtcttgagtccaacccggtaagacacgacttatcgccactggcagcagccactggtaacaggattagcagagcgaggtatgtaggcggtgctacagagttcttgaagtggtggcctaactacggctacactagaagaacagtatttggtatctgcgctctgctgaagccagttaccttcggaaaaagagttggtagctcttgatccggcaaacaaaccaccgctggtagcggtggtttttttgtttgcaagcagcagattacgcgcagaaaaaaaggatctcaagaagatcctttgatcttttctacggggtctgacgctcagtggaacgaaaactcacgttaagggattttggtcatgagattatcaaaaaggatcttcacctagatccttttaaattaaaaatgaagttttaaatcaatctaaagtatatatgagtaaacttggtctgacagttaccaatgcttaatcagtgaggcacctatctcagcgatctgtctatttcgttcatccatagttgcctgactccccgtcgtgtagataactacgatacgggagggcttaccatctggccccagtgctgcaatgataccgcgggacccacgctcaccggctccagatttatcagcaataaaccagccagccggaagggccgagcgcagaagtggtcctgcaactttatccgcctccatccagtctattaattgttgccgggaagctagagtaagtagttcgccagttaatagtttgcgcaacgttgttgccattgctacaggcatcgtggtgtcacgctcgtcgtttggtatggcttcattcagctccggttcccaacgatcaaggcgagttacatgatcccccatgttgtgcaaaaaagcggttagctccttcggtcctccgatcgttgtcagaagtaagttggccgcagtgttatcactcatggttatggcagcactgcataattctcttactgtcatgccatccgtaagatgcttttctgtgactggtgagtactcaaccaagtcattctgagaatagtgtatgcggcgaccgagttgctcttgcccggcgtcaatacgggataataccgcgccacatagcagaactttaaaagtgctcatcattggaaaacgttcttcggggcgaaaactctcaaggatcttaccgctgttgagatccagttcgatgtaacccactcgtgcacccaactgatcttcagcatcttttactttcaccagcgtttctgggtgagcaaaaacaggaaggcaaaatgccgcaaaaaagggaataagggcgacacggaaatgttgaatactcatactcttcctttttcaatattattgaagcatttatcagggttattgtctcatgagcggatacatatttgaatgtatttagaaaaataaacaaataggggttccgcgcacatttccccgaaaagtgccacctgacgtctaagaaaccattattatcatgacattaacctataaaaataggcgtatcacgaggccctttcgtc

SEQ ID NO: 262 - DNA, 5875 bp, synthetic construct
  source 1..5875: mol_type = other DNA
tcgcgcgtttcggtgatgacggtgaaaacctctgacacatgcagctcccggagacggtcacagcttgtctgtaagcggatgccgggagcagacaagcccgtcagggcgcgtcagcgggtgttggcgggtgtcggggctggcttaactatgcggcatcagagcagattgtactgagagtgcaccatatgcggtgtgaaataccgcacagatgcgtaaggagaaaataccgcatcaggcgccattcgccattcaggctgcgcaactgttgggaagggcgatcggtgcgggcctcttcgctattacgccagctggcgaaagggggatgtgctgcaaggcgattaagttgggtaacgccagggttttcccagtcacgacgttgtaaaacgacggccagtgaattggagatcggtacttcgcgagtttaaactaatacgactcactataagggaaataagagagaaaagaagagtaagaagaaatataagagaattcgccaccatggatgaataccaaaggtctttatcaagaccattgctaacgattatgtctattaatatagaaggtttgtcacttgctaaggaagaactattagccaaaatgtctgaggacatctcgtgtgacatcctatgtatacaggaaacacacagagacatcacaatgaggagaccaaaaattcttggaatgcaactggcagtggaacgacctcacagacaatatggcagtgccatttttgtacgatctggtgtagcaatctctgcaacttccctcacagaagtgaacaacattgaaatcttatctgtggaacttgatagttgcaccgtatcatcactctataaaccacctggggctgatttctattttacacccccaaccagttgccacaatcatgaagcccattttgttgtgggagatttcaatagccacagctgtgtctggggctatgacgaagatgatagaaatggcgaagcagttctaacgtgggccgacaatagtagaatgagcctccttcatgacagtaaattaccaccatcatttaatagcggccgatggaagcgtggttataaccctgatctgatttttgtaaaggaaagcataagccaccaatgcaccaaaagggtattaaacccaatacctaacacacaacacagaccaatatgctgcgtagcatatgcagctgtaagaccgaaaagtgtcccattccgcagaagatttaacttcaataaagctaactggacaaagtttacagagaccttggaagctgctatttctgatatagaaccttctatagaaaattatgacctgttcgtagaagctgtgaaaagatcctcaaggctctcaatccctagaggctgtcgcacaagctacctaccaggcctaaacgaagaatcactaaatcagctacaagaatatctcagattatttcaagagaacccatacagtgatgggactatagcagcaggccaaaaactatctacagccttagctaatgctaagaaagaccgttggatagagctgcttgagaacctggacatgtccaagagtagccgaaaagcctggcaattgctgagacgcctggatagtgaccctctggtcaaccctggacacgcgaacgtgacaccagatcagatagctcaccagctaattcagaatgggaaaaccaactgcagcagaataaagatgaaaatcaacagggtgccagaacttgaaacccaccagttgtcctctcctctaaacctgaaagaactcagagaagccatcaagcgatgtaagactggtaaagcacctggcctagatgacctgatgatggagcaaatcaaacacttggggcccaaagctgaaaactggcttttgaaattctacaatcaatgcctggcacacaaacagattcccagagcatggaggaaaactaagataattgccatcttaaaacctggtaaagatgcctccaatgccaggaactatcgaccaatctccctcttatgtcatctatataaagtctatgagaggatgctattaaatcgactaggacctgttatcgaacccaagcttattgcacaacaagcaggtttcagaccagggaaaaactgtacaggtcaaattcttcatctgactgaacatatcgaggaaggctatgagaaaggctgcattacgggaacagtctttgtggaccttacggcagcctatgacacggtgcaacatagaaaaatgctgcataaagtctaccatatcacccgggactttgactttacaaaaactgtccagaccctcttagaaaaccgcagcttctatgtggagtttcagggccagaaaagcagatggaggaggcaaaagaatggtttaccccaaggcagcgttcttgcaccaaccttatttaacatcttcacgaacgatcagccacaaccaccactcacaaagagctttatatatgctgatgaccttggccttacaacacaagcaaaagattttgaaacagttgaaaagcaactcaccaatgccttgaaagatctctccagctactacaaagagaaccacctgaagcctaaccctgccaagacacaagtgtgtgctttccacctacgtaaccgcgaagccaacaggaaactgaaagttacttgggaaggccaagagctcgaacactgtttccatcctaaataccttggtgtcaccttagaccgaacactaacatataggaaacactgcatgaacaccaagcacaaagtagctgcacgcaataacatcctgcggaaactgactggcagcgcatggggagcagacccacaagtaataagaacatcagccctggccttgtctttctcaactgcagagtatgcctgtcctgtttggcacaagtctgcccatgcaaagcaggtggacatagcactgaatgaaacatgcagaatcatcacgggatgccttaaacctacacctgttgataaactctacaagttagctggcattgcccctcctgacgtgcgacgggaagttgctgctaacggtgagagaaaaaaggtcgaacattgtgaaagccacccactgcatggctatcaccctcctcccaccagactcaaatcaaggaagggcttcatgagaaccaccactcctcttgatgttcctccagcagcagcaagggtgtccctctgggcagctaaacctggcaattctaactggatggccccccaagagggacttcctccaggggcaaaccaagaatgggcaacttggaagtccctgaacagactcagaagtggagtgggcagatcaaaagacaacttggcaaggtggcactacctggaggaatcctccaccttgtgtgactgtggagctgaacaaacaactcagcatatgtatgcttgcccacaatgccctgcctcatgtacggaggaggagttgtttaaagctacagacaatgcggttgctgttgcccgcttttggtccaaaactatttaggtcgacgctagcaccggtaaaaaaaaaaaaaaaaaaaaaaaaaaaaaaaacgttgactaaaaaaaaaaaaaaaaaaaaaaaaaaaaaaaaaaaaaaaaaaaaaaaaaaaaaaaaaaaaaaaaaaaaaaaaaaaagtcttcgcgcgcatcatcggatgccgggaccgacgagtgcagaggcgtgcaagcgagcttggcgtaatcatggtcatagctgtttcctgtgtgaaattgttatccgctcacaattccacacaacatacgagccggaagcataaagtgtaaagcctggggtgcctaatgagtgagctaactcacattaattgcgttgcgctcactgcccgctttccagtcgggaaacctgtcgtgccagctgcattaatgaatcggccaacgcgcggggagaggcggtttgcgtattgggcgctcttccgcttcctcgctcactgactcgctgcgctcggtcgttcggctgcggcgagcggtatcagctcactcaaaggcggtaatacggttatccacagaatcaggggataacgcaggaaagaacatgtgagcaaaaggccagcaaaaggccaggaaccgtaaaaaggccgcgttgctggcgtttttccataggctccgcccccctgacgagcatcacaaaaatcgacgctcaagtcagaggtggcgaaacccgacaggactataaagataccaggcgtttccccctggaagctccctcgtgcgctctcctgttccgaccctgccgcttaccggatacctgtccgcctttctcccttcgggaagcgtggcgctttctcatagctcacgctgtaggtatctcagttcggtgtaggtcgttcgctccaagctgggctgtgtgcacgaaccccccgttcagcccgaccgctgcgccttatccggtaactatcgtcttgagtccaacccggtaagacacgacttatcgccactggcagcagccactggtaacaggattagcagagcgaggtatgtaggcggtgctacagagttcttgaagtggtggcctaactacggctacactagaagaacagtatttggtatctgcgctctgctgaagccagttaccttcggaaaaagagttggtagctcttgatccggcaaacaaaccaccgctggtagcggtggtttttttgtttgcaagcagcagattacgcgcagaaaaaaaggatctcaagaagatcctttgatcttttctacggggtctgacgctcagtggaacgaaaactcacgttaagggattttggtcatgagattatcaaaaaggatcttcacctagatccttttaaattaaaaatgaagttttaaatcaatctaaagtatatatgagtaaacttggtctgacagttaccaatgcttaatcagtgaggcacctatctcagcgatctgtctatttcgttcatccatagttgcctgactccccgtcgtgtagataactacgatacgggagggcttaccatctggccccagtgctgcaatgataccgcgggacccacgctcaccggctccagatttatcagcaataaaccagccagccggaagggccgagcgcagaagtggtcctgcaactttatccgcctccatccagtctattaattgttgccgggaagctagagtaagtagttcgccagttaatagtttgcgcaacgttgttgccattgctacaggcatcgtggtgtcacgctcgtcgtttggtatggcttcattcagctccggttcccaacgatcaaggcgagttacatgatcccccatgttgtgcaaaaaagcggttagctccttcggtcctccgatcgttgtcagaagtaagttggccgcagtgttatcactcatggttatggcagcactgcataattctcttactgtcatgccatccgtaagatgcttttctgtgactggtgagtactcaaccaagtcattctgagaatagtgtatgcggcgaccgagttgctcttgcccggcgtcaatacgggataataccgcgccacatagcagaactttaaaagtgctcatcattggaaaacgttcttcggggcgaaaactctcaaggatcttaccgctgttgagatccagttcgatgtaacccactcgtgcacccaactgatcttcagcatcttttactttcaccagcgtttctgggtgagcaaaaacaggaaggcaaaatgccgcaaaaaagggaataagggcgacacggaaatgttgaatactcatactcttcctttttcaatattattgaagcatttatcagggttattgtctcatgagcggatacatatttgaatgtatttagaaaaataaacaaataggggttccgcgcacatttccccgaaaagtgccacctgacgtctaagaaaccattattatcatgacattaacctataaaaataggcgtatcacgaggccctttcgtc

SEQ ID NO: 263 - protein, 1103 aa, synthetic construct
MKRTADGSEFESPKKKRKVAASLNGAPLIKDPMLIFVKTLTGKTITLEVEPSDTIENVKAKIQDKEGIPPDQQRLAFAGKSLEDGRTLSDYNILKDSKLHPLLRLRSGSETPGTSESATPESDEYQRSLSRPLLTIMSINIEGLSLAKEELLAKMSEDISCDILCIQETHRDITMRRPKILGMQLAVERPHRQYGSAIFVRSGVAISATSLTEVNNIEILSVELDSCTVSSLYKPPGADFYFTPPTSCHNHEAHFVVGDFNSHSCVWGYDEDDRNGEAVLTWADNSRMSLLHDSKLPPSFNSGRWKRGYNPDLIFVKESISHQCTKRVLNPIPNTQHRPICCVAYAAVRPKSVPFRRRFNFNKANWTKFTETLEAAISDIEPSIENYDLFVEAVKRSSRLSIPRGCRTSYLPGLNEESLNQLQEYLRLFQENPYSDGTIAAGQKLSTALANAKKDRWIELLENLDMSKSSRKAWQLLRRLDSDPLVNPGHANVTPDQIAHQLIQNGKTNCSRIKMKINRVPELETHQLSSPLNLKELREAIKRCKTGKAPGLDDLMMEQIKHLGPKAENWLLKFYNQCLAHKQIPRAWRKTKIIAILKPGKDASNARNYRPISLLCHLYKVYERMLLNRLGPVIEPKLIAQQAGFRPGKNCTGQILHLTEHIEEGYEKGCITGTVFVDLTAAYDTVQHRKMLHKVYHITRDFDFTKTVQTLLENRSFYVEFQGQKSRWRRQKNGLPQGSVLAPTLFNIFTNDQPQPPLTKSFIYADDLGLTTQAKDFETVEKQLTNALKDLSSYYKENHLKPNPAKTQVCAFHLRNREANRKLKVTWEGQELEHCFHPKYLGVTLDRTLTYRKHCMNTKHKVAARNNILRKLTGSAWGADPQVIRTSALALSFSTAEYACPVWHKSAHAKQVDIALNETCRIITGCLKPTPVDKLYKLAGIAPPDVRREVAANGERKKVEHCESHPLHGYHPPPTRLKSRKGFMRTTTPLDVPPAAARVSLWAAKPGNSNWMAPQEGLPPGANQEWATWKSLNRLRSGVGRSKDNLARWHYLEESSTLCDCGAEQTTQHMYACPQCPASCTEEELFKATDNAVAVARFWSKTI

SEQ ID NO: 264 - protein, 1223 aa, synthetic construct
MDEYQRSLSRPLLTIMSINIEGLSLAKEELLAKMSEDISCDILCIQETHRDITMRRPKILGMQLAVERPHRQYGSAIFVRSGVAISATSLTEVNNIEILSVELDSCTVSSLYKPPGADFYFTPPTSCHNHEAHFVVGDFNSHSCVWGYDEDDRNGEAVLTWADNSRMSLLHDSKLPPSFNSGRWKRGYNPDLIFVKESISHQCTKRVLNPIPNTQHRPICCVAYAAVRPKSVPFRRRFNFNKANWTKFTETLEAAISDIEPSIENYDLFVEAVKRSSRLSIPRGCRTSYLPGLNEESLNQLQEYLRLFQENPYSDGTIAAGQKLSTALANAKKDRWIELLENLDMSKSSRKAWQLLRRLDSDPLVNPGHANVTPDQIAHQLIQNGKTNCSRIKMKINRVPELETHQLSSPLNLKELREAIKRCKTGKAPGLDDLMMEQIKHLGPKAENWLLKFYNQCLAHKQIPRAWRKTKIIAILKPGKDASNARNYRPISLLCHLYKVYERMLLNRLGPVIEPKLIAQQAGFRPGKNCTGQILHLTEHIEEGYEKGCITGTVFVDLTAAYDTVQHRKMLHKVYHITRDFDFTKTVQTLLENRSFYVEFQGQKSRWRRQKNGLPQGSVLAPTLFNIFTNDQPQPPLTKSFIYADDLGLTTQAKDFETVEKQLTNALKDLSSYYKENHLKPNPAKTQVCAFHLRNREANRKLKVTWEGQELEHCFHPKYLGVTLDRTLTYRKHCMNTKHKVAARNNILRKLTGSAWGADPQVIRTSALALSFSTAEYACPVWHKSAHAKQVDIALNETCRIITGCLKPTPVDKLYKLAGIAPPDVRREVAANGERKKVEHCESHPLHGYHPPPTRLKSRKGFMRTTTPLDVPPAAARVSLWAAKPGNSNWMAPQEGLPPGANQEWATWKSLNRLRSGVGRSKDNLARWHYLEESSTLCDCGAEQTTQHMYACPQCPASCTEEELFKATDNAVAVARFWSKTIGGSGSETPGTSESATPESGGSGEDTQAIDWDVEEEEETEQSSESLRCNVEPVGRLHIFSGAHGPEKDFPLHLGKNVVGRMPDCSVALPFPSISKQHAEIEILAWDKAPILRDCGSLNGTQILRPPKVLSPGVSHRLRDQELILFADLLCQYHRLDVSLPFVSRGPLTVEETPRVQGETQPQRLLLAEDSEEEVDFLSERRMVKKSRTTSSSVIVPESDEEGHSPVLGGLGPPFAFNLNSDT

SEQ ID NO: 265 - protein, 1054 aa, synthetic construct
MDEYQRSLSRPLLTIMSINIEGLSLAKEELLAKMSEDISCDILCIQETHRDITMRRPKILGMQLAVERPHRQYGSAIFVRSGVAISATSLTEVNNIEILSVELDSCTVSSLYKPPGADFYFTPPTSCHNHEAHFVVGDFNSHSCVWGYDEDDRNGEAVLTWADNSRMSLLHDSKLPPSFNSGRWKRGYNPDLIFVKESISHQCTKRVLNPIPNTQHRPICCVAYAAVRPKSVPFRRRFNFNKANWTKFTETLEAAISDIEPSIENYDLFVEAVKRSSRLSIPRGCRTSYLPGLNEESLNQLQEYLRLFQENPYSDGTIAAGQKLSTALANAKKDRWIELLENLDMSKSSRKAWQLLRRLDSDPLVNPGHANVTPDQIAHQLIQNGKTNCSRIKMKINRVPELETHQLSSPLNLKELREAIKRCKTGKAPGLDDLMMEQIKHLGPKAENWLLKFYNQCLAHKQIPRAWRKTKIIAILKPGKDASNARNYRPISLLCHLYKVYERMLLNRLGPVIEPKLIAQQAGFRPGKNCTGQILHLTEHIEEGYEKGCITGTVFVDLTAAYDTVQHRKMLHKVYHITRDFDFTKTVQTLLENRSFYVEFQGQKSRWRRQKNGLPQGSVLAPTLFNIFTNDQPQPPLTKSFIYADDLGLTTQAKDFETVEKQLTNALKDLSSYYKENHLKPNPAKTQVCAFHLRNREANRKLKVTWEGQELEHCFHPKYLGVTLDRTLTYRKHCMNTKHKVAARNNILRKLTGSAWGADPQVIRTSALALSFSTAEYACPVWHKSAHAKQVDIALNETCRIITGCLKPTPVDKLYKLAGIAPPDVRREVAANGERKKVEHCESHPLHGYHPPPTRLKSRKGFMRTTTPLDVPPAAARVSLWAAKPGNSNWMAPQEGLPPGANQEWATWKSLNRLRSGVGRSKDNLARWHYLEESSTLCDCGAEQTTQHMYACPQCPASCTEEELFKATDNAVAVARFWSKTISGSETPGTSESATPEGSPTLLGFHTASGKKVKIAKESLDKVKNLFDEKEQGGSGKRTADGSEFESPKKKRKV

SEQ ID NO: 266 - protein, 1481 aa, synthetic construct
MKRTADGSEFESPKKKRKVADQLYLENIDEFVTDQNKIVTYKWLSYTLGVHVNQAKQMLYDYVERKRKENSGAQLHVTYLVSGSLIQNGHSCHKVAVVREDKLEAVKSKLAVTASIHVYSIQKAMLKDSGPLFNTDYDILKSNLQNCSKFSAIQCAAAVPRAPAESSSSSKKFEQSHLHMSSETQANNELTTNGHGPPASKQVSQQPKGIMGMFASKAAAKTQETNKETKTEAKEVTNASAAGNKAPGKGNMMSNFFGKAAMNKFKVNLDSEQAVKEEKIVEQPTVSVTEPKLATPAGLKKSSKKAEPVKVLQKEKKRGKRVALSDDETKETENMRKKRRRIKLPESDSSEDEVFPDSPGAYEAESPSPPPPPSPPLEPVPKTEPEPPSVKSSSGENKRKRKRVLKSKTYLDGEGCIVTEKVYESESCTDSEEELNMKTSSVHRPPAMTVKKEPREERKGPKKGTAALGKANRQVSITGFFQRKSGSETPGTSESATPESDEYQRSLSRPLLTIMSINIEGLSLAKEELLAKMSEDISCDILCIQETHRDITMRRPKILGMQLAVERPHRQYGSAIFVRSGVAISATSLTEVNNIEILSVELDSCTVSSLYKPPGADFYFTPPTSCHNHEAHFVVGDFNSHSCVWGYDEDDRNGEAVLTWADNSRMSLLHDSKLPPSFNSGRWKRGYNPDLIFVKESISHQCTKRVLNPIPNTQHRPICCVAYAAVRPKSVPFRRRFNFNKANWTKFTETLEAAISDIEPSIENYDLFVEAVKRSSRLSIPRGCRTSYLPGLNEESLNQLQEYLRLFQENPYSDGTIAAGQKLSTALANAKKDRWIELLENLDMSKSSRKAWQLLRRLDSDPLVNPGHANVTPDQIAHQLIQNGKTNCSRIKMKINRVPELETHQLSSPLNLKELREAIKRCKTGKAPGLDDLMMEQIKHLGPKAENWLLKFYNQCLAHKQIPRAWRKTKIIAILKPGKDASNARNYRPISLLCHLYKVYERMLLNRLGPVIEPKLIAQQAGFRPGKNCTGQILHLTEHIEEGYEKGCITGTVFVDLTAAYDTVQHRKMLHKVYHITRDFDFTKTVQTLLENRSFYVEFQGQKSRWRRQKNGLPQGSVLAPTLFNIFTNDQPQPPLTKSFIYADDLGLTTQAKDFETVEKQLTNALKDLSSYYKENHLKPNPAKTQVCAFHLRNREANRKLKVTWEGQELEHCFHPKYLGVTLDRTLTYRKHCMNTKHKVAARNNILRKLTGSAWGADPQVIRTSALALSFSTAEYACPVWHKSAHAKQVDIALNETCRIITGCLKPTPVDKLYKLAGIAPPDVRREVAANGERKKVEHCESHPLHGYHPPPTRLKSRKGFMRTTTPLDVPPAAARVSLWAAKPGNSNWMAPQEGLPPGANQEWATWKSLNRLRSGVGRSKDNLARWHYLEESSTLCDCGAEQTTQHMYACPQCPASCTEEELFKATDNAVAVARFWSKTI

SEQ ID NO: 267 - protein, 1107 aa, synthetic construct
MDEYQRSLSRPLLTIMSINIEGLSLAKEELLAKMSEDISCDILCIQETHRDITMRRPKILGMQLAVERPHRQYGSAIFVRSGVAISATSLTEVNNIEILSVELDSCTVSSLYKPPGADFYFTPPTSCHNHEAHFVVGDFNSHSCVWGYDEDDRNGEAVLTWADNSRMSLLHDSKLPPSFNSGRWKRGYNPDLIFVKESISHQCTKRVLNPIPNTQHRPICCVAYAAVRPKSVPFRRRFNFNKANWTKFTETLEAAISDIEPSIENYDLFVEAVKRSSRLSIPRGCRTSYLPGLNEESLNQLQEYLRLFQENPYSDGTIAAGQKLSTALANAKKDRWIELLENLDMSKSSRKAWQLLRRLDSDPLVNPGHANVTPDQIAHQLIQNGKTNCSRIKMKINRVPELETHQLSSPLNLKELREAIKRCKTGKAPGLDDLMMEQIKHLGPKAENWLLKFYNQCLAHKQIPRAWRKTKIIAILKPGKDASNARNYRPISLLCHLYKVYERMLLNRLGPVIEPKLIAQQAGFRPGKNCTGQILHLTEHIEEGYEKGCITGTVFVDLTAAYDTVQHRKMLHKVYHITRDFDFTKTVQTLLENRSFYVEFQGQKSRWRRQKNGLPQGSVLAPTLFNIFTNDQPQPPLTKSFIYADDLGLTTQAKDFETVEKQLTNALKDLSSYYKENHLKPNPAKTQVCAFHLRNREANRKLKVTWEGQELEHCFHPKYLGVTLDRTLTYRKHCMNTKHKVAARNNILRKLTGSAWGADPQVIRTSALALSFSTAEYACPVWHKSAHAKQVDIALNETCRIITGCLKPTPVDKLYKLAGIAPPDVRREVAANGERKKVEHCESHPLHGYHPPPTRLKSRKGFMRTTTPLDVPPAAARVSLWAAKPGNSNWMAPQEGLPPGANQEWATWKSLNRLRSGVGRSKDNLARWHYLEESSTLCDCGAEQTTQHMYACPQCPASCTEEELFKATDNAVAVARFWSKTISGSETPGTSESATPEGSAASLNGAPLIKDPMLIFVKTLTGKTITLEVEPSDTIENVKAKIQDKEGIPPDQQRLAFAGKSLEDGRTLSDYNILKDSKLHPLLRLRGGSGKRTADGSEFEPKKKRKV

SEQ ID NO: 268 - protein, 989 aa, synthetic construct
MPSQQKRKDEYQRSLSRPLLTIMSINIEGLSLAKEELLAKMSEDISCDILCIQETHRDITMRRPKILGMQLAVERPHRQYGSAIFVRSGVAISATSLTEVNNIEILSVELDSCTVSSLYKPPGADFYFTPPTSCHNHEAHFVVGDFNSHSCVWGYDEDDRNGEAVLTWADNSRMSLLHDSKLPPSFNSGRWKRGYNPDLIFVKESISHQCTKRVLNPIPNTQHRPICCVAYAAVRPKSVPFRRRFNFNKANWTKFTETLEAAISDIEPSIENYDLFVEAVKRSSRLSIPRGCRTSYLPGLNEESLNQLQEYLRLFQENPYSDGTIAAGQKLSTALANAKKDRWIELLENLDMSKSSRKAWQLLRRLDSDPLVNPGHANVTPDQIAHQLIQNGKTNCSRIKMKINRVPELETHQLSSPLNLKELREAIKRCKTGKAPGLDDLMMEQIKHLGPKAENWLLKFYNQCLAHKQIPRAWRKTKIIAILKPGKDASNARNYRPISLLCHLYKVYERMLLNRLGPVIEPKLIAQQAGFRPGKNCTGQILHLTEHIEEGYEKGCITGTVFVDLTAAYDTVQHRKMLHKVYHITRDFDFTKTVQTLLENRSFYVEFQGQKSRWRRQKNGLPQGSVLAPTLFNIFTNDQPQPPLTKSFIYADDLGLTTQAKDFETVEKQLTNALKDLSSYYKENHLKPNPAKTQVCAFHLRNREANRKLKVTWEGQELEHCFHPKYLGVTLDRTLTYRKHCMNTKHKVAARNNILRKLTGSAWGADPQVIRTSALALSFSTAEYACPVWHKSAHAKQVDIALNETCRIITGCLKPTPVDKLYKLAGIAPPDVRREVAANGERKKVEHCESHPLHGYHPPPTRLKSRKGFMRTTTPLDVPPAAARVSLWAAKPGNSNWMAPQEGLPPGANQEWATWKSLNRLRSGVGRSKDNLARWHYLEESSTLCDCGAEQTTQHMYACPQCPASCTEEELFKATDNAVAVARFWSKTI

SEQ ID NO: 269 - protein, 988 aa, synthetic construct
MKKKSKKDEYQRSLSRPLLTIMSINIEGLSLAKEELLAKMSEDISCDILCIQETHRDITMRRPKILGMQLAVERPHRQYGSAIFVRSGVAISATSLTEVNNIEILSVELDSCTVSSLYKPPGADFYFTPPTSCHNHEAHFVVGDFNSHSCVWGYDEDDRNGEAVLTWADNSRMSLLHDSKLPPSFNSGRWKRGYNPDLIFVKESISHQCTKRVLNPIPNTQHRPICCVAYAAVRPKSVPFRRRFNFNKANWTKFTETLEAAISDIEPSIENYDLFVEAVKRSSRLSIPRGCRTSYLPGLNEESLNQLQEYLRLFQENPYSDGTIAAGQKLSTALANAKKDRWIELLENLDMSKSSRKAWQLLRRLDSDPLVNPGHANVTPDQIAHQLIQNGKTNCSRIKMKINRVPELETHQLSSPLNLKELREAIKRCKTGKAPGLDDLMMEQIKHLGPKAENWLLKFYNQCLAHKQIPRAWRKTKIIAILKPGKDASNARNYRPISLLCHLYKVYERMLLNRLGPVIEPKLIAQQAGFRPGKNCTGQILHLTEHIEEGYEKGCITGTVFVDLTAAYDTVQHRKMLHKVYHITRDFDFTKTVQTLLENRSFYVEFQGQKSRWRRQKNGLPQGSVLAPTLFNIFTNDQPQPPLTKSFIYADDLGLTTQAKDFETVEKQLTNALKDLSSYYKENHLKPNPAKTQVCAFHLRNREANRKLKVTWEGQELEHCFHPKYLGVTLDRTLTYRKHCMNTKHKVAARNNILRKLTGSAWGADPQVIRTSALALSFSTAEYACPVWHKSAHAKQVDIALNETCRIITGCLKPTPVDKLYKLAGIAPPDVRREVAANGERKKVEHCESHPLHGYHPPPTRLKSRKGFMRTTTPLDVPPAAARVSLWAAKPGNSNWMAPQEGLPPGANQEWATWKSLNRLRSGVGRSKDNLARWHYLEESSTLCDCGAEQTTQHMYACPQCPASCTEEELFKATDNAVAVARFWSKTI

SEQ ID NO: 270 - protein, 1034 aa, synthetic construct
MDEYQRSLSRPLLTIMSINIEGLSLAKEELLAKMSEDISCDILCIQETHRDITMRRPKILGMQLAVERPHRQYGSAIFVRSGVAISATSLTEVNNIEILSVELDSCTVSSLYKPPGADFYFTPPTSCHNHEAHFVVGDFNSHSCVWGYDEDDRNGEAVLTWADNSRMSLLHDSKLPPSFNSGRWKRGYNPDLIFVKESISHQCTKRVLNPIPNTQHRPICCVAYAAVRPKSVPFRRRFNFNKANWTKFTETLEAAISDIEPSIENYDLFVEAVKRSSRLSIPRGCRTSYLPGLNEESLNQLQEYLRLFQENPYSDGTIAAGQKLSTALANAKKDRWIELLENLDMSKSSRKAWQLLRRLDSDPLVNPGHANVTPDQIAHQLIQNGKTNCSRIKMKINRVPELETHQLSSPLNLKELREAIKRCKTGKAPGLDDLMMEQIKHLGPKAENWLLKFYNQCLAHKQIPRAWRKTKIIAILKPGKDASNARNYRPISLLCHLYKVYERMLLNRLGPVIEPKLIAQQAGFRPGKNCTGQILHLTEHIEEGYEKGCITGTVFVDLTAAYDTVQHRKMLHKVYHITRDFDFTKTVQTLLENRSFYVEFQGQKSRWRRQKNGLPQGSVLAPTLFNIFTNDQPQPPLTKSFIYADDLGLTTQAKDFETVEKQLTNALKDLSSYYKENHLKPNPAKTQVCAFHLRNREANRKLKVTWEGQELEHCFHPKYLGVTLDRTLTYRKHCMNTKHKVAARNNILRKLTGSAWGADPQVIRTSALALSFSTAEYACPVWHKSAHAKQVDIALNETCRIITGCLKPTPVDKLYKLAGIAPPDVRREVAANGERKKVEHCESHPLHGYHPPPTRLKSRKGFMRTTTPLDVPPAAARVSLWAAKPGNSNWMAPQEGLPPGANQEWATWKSLNRLRSGVGRSKDNLARWHYLEESSTLCDCGAEQTTQHMYACPQCPASCTEEELFKATDNAVAVARFWSKTIGGSGSETPGTSESATPESGGSGEKRTPLHAAAYLGDAEIIELLILSGARVNA

SEQ ID NO: 271 - protein, 1254 aa, synthetic construct
MDEYQRSLSRPLLTIMSINIEGLSLAKEELLAKMSEDISCDILCIQETHRDITMRRPKILGMQLAVERPHRQYGSAIFVRSGVAISATSLTEVNNIEILSVELDSCTVSSLYKPPGADFYFTPPTSCHNHEAHFVVGDFNSHSCVWGYDEDDRNGEAVLTWADNSRMSLLHDSKLPPSFNSGRWKRGYNPDLIFVKESISHQCTKRVLNPIPNTQHRPICCVAYAAVRPKSVPFRRRFNFNKANWTKFTETLEAAISDIEPSIENYDLFVEAVKRSSRLSIPRGCRTSYLPGLNEESLNQLQEYLRLFQENPYSDGTIAAGQKLSTALANAKKDRWIELLENLDMSKSSRKAWQLLRRLDSDPLVNPGHANVTPDQIAHQLIQNGKTNCSRIKMKINRVPELETHQLSSPLNLKELREAIKRCKTGKAPGLDDLMMEQIKHLGPKAENWLLKFYNQCLAHKQIPRAWRKTKIIAILKPGKDASNARNYRPISLLCHLYKVYERMLLNRLGPVIEPKLIAQQAGFRPGKNCTGQILHLTEHIEEGYEKGCITGTVFVDLTAAYDTVQHRKMLHKVYHITRDFDFTKTVQTLLENRSFYVEFQGQKSRWRRQKNGLPQGSVLAPTLFNIFTNDQPQPPLTKSFIYADDLGLTTQAKDFETVEKQLTNALKDLSSYYKENHLKPNPAKTQVCAFHLRNREANRKLKVTWEGQELEHCFHPKYLGVTLDRTLTYRKHCMNTKHKVAARNNILRKLTGSAWGADPQVIRTSALALSFSTAEYACPVWHKSAHAKQVDIALNETCRIITGCLKPTPVDKLYKLAGIAPPDVRREVAANGERKKVEHCESHPLHGYHPPPTRLKSRKGFMRTTTPLDVPPAAARVSLWAAKPGNSNWMAPQEGLPPGANQEWATWKSLNRLRSGVGRSKDNLARWHYLEESSTLCDCGAEQTTQHMYACPQCPASCTEEELFKATDNAVAVARFWSKTIGGSGSETPGTSESATPESGGSGLVEPEEVVEMSHMPGDLFNLYLHQNYIDFFMEIDDIVRASEFLSFADILSGDWNTRSLLREYSTSIATRGVMHSNKARGYAHCQGGGSSFRPLHKPQWFLINKKYRENCLAAKALFPDFCLPALCLQTQLLPYLALLTIPMRNQAQISFIQDIGRLPLKRHFGRLKMEALTDREHGMIDPDSGDEAQLNGGHSAEESLGEPTQATVPETWSLPLSQNSASELPASQPQPFSAQGDMEENIIIEDYESDGT

SEQ ID NO: 272 - protein, 1072 aa, synthetic construct
MDEYQRSLSRPLLTIMSINIEGLSLAKEELLAKMSEDISCDILCIQETHRDITMRRPKILGMQLAVERPHRQYGSAIFVRSGVAISATSLTEVNNIEILSVELDSCTVSSLYKPPGADFYFTPPTSCHNHEAHFVVGDFNSHSCVWGYDEDDRNGEAVLTWADNSRMSLLHDSKLPPSFNSGRWKRGYNPDLIFVKESISHQCTKRVLNPIPNTQHRPICCVAYAAVRPKSVPFRRRFNFNKANWTKFTETLEAAISDIEPSIENYDLFVEAVKRSSRLSIPRGCRTSYLPGLNEESLNQLQEYLRLFQENPYSDGTIAAGQKLSTALANAKKDRWIELLENLDMSKSSRKAWQLLRRLDSDPLVNPGHANVTPDQIAHQLIQNGKTNCSRIKMKINRVPELETHQLSSPLNLKELREAIKRCKTGKAPGLDDLMMEQIKHLGPKAENWLLKFYNQCLAHKQIPRAWRKTKIIAILKPGKDASNARNYRPISLLCHLYKVYERMLLNRLGPVIEPKLIAQQAGFRPGKNCTGQILHLTEHIEEGYEKGCITGTVFVDLTAAYDTVQHRKMLHKVYHITRDFDFTKTVQTLLENRSFYVEFQGQKSRWRRQKNGLPQGSVLAPTLFNIFTNDQPQPPLTKSFIYADDLGLTTQAKDFETVEKQLTNALKDLSSYYKENHLKPNPAKTQVCAFHLRNREANRKLKVTWEGQELEHCFHPKYLGVTLDRTLTYRKHCMNTKHKVAARNNILRKLTGSAWGADPQVIRTSALALSFSTAEYACPVWHKSAHAKQVDIALNETCRIITGCLKPTPVDKLYKLAGIAPPDVRREVAANGERKKVEHCESHPLHGYHPPPTRLKSRKGFMRTTTPLDVPPAAARVSLWAAKPGNSNWMAPQEGLPPGANQEWATWKSLNRLRSGVGRSKDNLARWHYLEESSTLCDCGAEQTTQHMYACPQCPASCTEEELFKATDNAVAVARFWSKTIGGSGSETPGTSESATPESGGSGWSVEAVVLFLKQTDPLALCPLVDLFRSHEIDGKALLLLTSDVLLKHLGVKLGTAVKLCYYIDRLKQGK

SEQ ID NO: 273 - protein, 1068 aa, synthetic construct
MDEYQRSLSRPLLTIMSINIEGLSLAKEELLAKMSEDISCDILCIQETHRDITMRRPKILGMQLAVERPHRQYGSAIFVRSGVAISATSLTEVNNIEILSVELDSCTVSSLYKPPGADFYFTPPTSCHNHEAHFVVGDFNSHSCVWGYDEDDRNGEAVLTWADNSRMSLLHDSKLPPSFNSGRWKRGYNPDLIFVKESISHQCTKRVLNPIPNTQHRPICCVAYAAVRPKSVPFRRRFNFNKANWTKFTETLEAAISDIEPSIENYDLFVEAVKRSSRLSIPRGCRTSYLPGLNEESLNQLQEYLRLFQENPYSDGTIAAGQKLSTALANAKKDRWIELLENLDMSKSSRKAWQLLRRLDSDPLVNPGHANVTPDQIAHQLIQNGKTNCSRIKMKINRVPELETHQLSSPLNLKELREAIKRCKTGKAPGLDDLMMEQIKHLGPKAENWLLKFYNQCLAHKQIPRAWRKTKIIAILKPGKDASNARNYRPISLLCHLYKVYERMLLNRLGPVIEPKLIAQQAGFRPGKNCTGQILHLTEHIEEGYEKGCITGTVFVDLTAAYDTVQHRKMLHKVYHITRDFDFTKTVQTLLENRSFYVEFQGQKSRWRRQKNGLPQGSVLAPTLFNIFTNDQPQPPLTKSFIYADDLGLTTQAKDFETVEKQLTNALKDLSSYYKENHLKPNPAKTQVCAFHLRNREANRKLKVTWEGQELEHCFHPKYLGVTLDRTLTYRKHCMNTKHKVAARNNILRKLTGSAWGADPQVIRTSALALSFSTAEYACPVWHKSAHAKQVDIALNETCRIITGCLKPTPVDKLYKLAGIAPPDVRREVAANGERKKVEHCESHPLHGYHPPPTRLKSRKGFMRTTTPLDVPPAAARVSLWAAKPGNSNWMAPQEGLPPGANQEWATWKSLNRLRSGVGRSKDNLARWHYLEESSTLCDCGAEQTTQHMYACPQCPASCTEEELFKATDNAVAVARFWSKTIGGSGSETPGTSESATPESGGSGMVRRFLVTLRIRRACGPPRVRVFVVHIPRLTGEWAAPGAPAAVALVLMLLRSQRLGQQPLPRRP

SEQ ID NO: 274 - protein, 1053 aa, synthetic construct
MDEYQRSLSRPLLTIMSINIEGLSLAKEELLAKMSEDISCDILCIQETHRDITMRRPKILGMQLAVERPHRQYGSAIFVRSGVAISATSLTEVNNIEILSVELDSCTVSSLYKPPGADFYFTPPTSCHNHEAHFVVGDFNSHSCVWGYDEDDRNGEAVLTWADNSRMSLLHDSKLPPSFNSGRWKRGYNPDLIFVKESISHQCTKRVLNPIPNTQHRPICCVAYAAVRPKSVPFRRRFNFNKANWTKFTETLEAAISDIEPSIENYDLFVEAVKRSSRLSIPRGCRTSYLPGLNEESLNQLQEYLRLFQENPYSDGTIAAGQKLSTALANAKKDRWIELLENLDMSKSSRKAWQLLRRLDSDPLVNPGHANVTPDQIAHQLIQNGKTNCSRIKMKINRVPELETHQLSSPLNLKELREAIKRCKTGKAPGLDDLMMEQIKHLGPKAENWLLKFYNQCLAHKQIPRAWRKTKIIAILKPGKDASNARNYRPISLLCHLYKVYERMLLNRLGPVIEPKLIAQQAGFRPGKNCTGQILHLTEHIEEGYEKGCITGTVFVDLTAAYDTVQHRKMLHKVYHITRDFDFTKTVQTLLENRSFYVEFQGQKSRWRRQKNGLPQGSVLAPTLFNIFTNDQPQPPLTKSFIYADDLGLTTQAKDFETVEKQLTNALKDLSSYYKENHLKPNPAKTQVCAFHLRNREANRKLKVTWEGQELEHCFHPKYLGVTLDRTLTYRKHCMNTKHKVAARNNILRKLTGSAWGADPQVIRTSALALSFSTAEYACPVWHKSAHAKQVDIALNETCRIITGCLKPTPVDKLYKLAGIAPPDVRREVAANGERKKVEHCESHPLHGYHPPPTRLKSRKGFMRTTTPLDVPPAAARVSLWAAKPGNSNWMAPQEGLPPGANQEWATWKSLNRLRSGVGRSKDNLARWHYLEESSTLCDCGAEQTTQHMYACPQCPASCTEEELFKATDNAVAVARFWSKTIGGSGSETPGTSESATPESGGSGMLEELECGAPGARGAATAMDCKDRPAFPVKKLIQARLPFKRLNLVPKGK

SEQ ID NO: 275 - protein, 1263 aa, synthetic construct
MGTALTPLLTKFATRYEMGTTPEEVANTLKQTCFKGQVNDSQMVALLIVADQYKLNPFTKELYAFPDKNNGIVPVVGVDGWARIINENPQFDGMEFSMDQQGTECTCKIYRKDRSHAISATEYMAECKRNTQPWQSHPRRMLRHKAMIQCARLAFGFAGIYDQDEAERIVERDVTPAEQYEDVSEAICLIKDSPTMEDLQAAFSNAWKAYKTKGARDQLTAAKDQRKKELLDAPIDVEFEETGDDRAASGGSSGGSSGSETPGTSESATPESSGGSSGGSSMDEYQRSLSRPLLTIMSINIEGLSLAKEELLAKMSEDISCDILCIQETHRDITMRRPKILGMQLAVERPHRQYGSAIFVRSGVAISATSLTEVNNIEILSVELDSCTVSSLYKPPGADFYFTPPTSCHNHEAHFVVGDFNSHSCVWGYDEDDRNGEAVLTWADNSRMSLLHDSKLPPSFNSGRWKRGYNPDLIFVKESISHQCTKRVLNPIPNTQHRPICCVAYAAVRPKSVPFRRRFNFNKANWTKFTETLEAAISDIEPSIENYDLFVEAVKRSSRLSIPRGCRTSYLPGLNEESLNQLQEYLRLFQENPYSDGTIAAGQKLSTALANAKKDRWIELLENLDMSKSSRKAWQLLRRLDSDPLVNPGHANVTPDQIAHQLIQNGKTNCSRIKMKINRVPELETHQLSSPLNLKELREAIKRCKTGKAPGLDDLMMEQIKHLGPKAENWLLKFYNQCLAHKQIPRAWRKTKIIAILKPGKDASNARNYRPISLLCHLYKVYERMLLNRLGPVIEPKLIAQQAGFRPGKNCTGQILHLTEHIEEGYEKGCITGTVFVDLTAAYDTVQHRKMLHKVYHITRDFDFTKTVQTLLENRSFYVEFQGQKSRWRRQKNGLPQGSVLAPTLFNIFTNDQPQPPLTKSFIYADDLGLTTQAKDFETVEKQLTNALKDLSSYYKENHLKPNPAKTQVCAFHLRNREANRKLKVTWEGQELEHCFHPKYLGVTLDRTLTYRKHCMNTKHKVAARNNILRKLTGSAWGADPQVIRTSALALSFSTAEYACPVWHKSAHAKQVDIALNETCRIITGCLKPTPVDKLYKLAGIAPPDVRREVAANGERKKVEHCESHPLHGYHPPPTRLKSRKGFMRTTTPLDVPPAAARVSLWAAKPGNSNWMAPQEGLPPGANQEWATWKSLNRLRSGVGRSKDNLARWHYLEESSTLCDCGAEQTTQHMYACPQCPASCTEEELFKATDNAVAVARFWSKTI

SEQ ID NO: 276 - protein, 1087 aa, synthetic construct
MDEYQRSLSRPLLTIMSINIEGLSLAKEELLAKMSEDISCDILCIQETHRDITMRRPKILGMQLAVERPHRQYGSAIFVRSGVAISATSLTEVNNIEILSVELDSCTVSSLYKPPGADFYFTPPTSCHNHEAHFVVGDFNSHSCVWGYDEDDRNGEAVLTWADNSRMSLLHDSKLPPSFNSGRWKRGYNPDLIFVKESISHQCTKRVLNPIPNTQHRPICCVAYAAVRPKSVPFRRRFNFNKANWTKFTETLEAAISDIEPSIENYDLFVEAVKRSSRLSIPRGCRTSYLPGLNEESLNQLQEYLRLFQENPYSDGTIAAGQKLSTALANAKKDRWIELLENLDMSKSSRKAWQLLRRLDSDPLVNPGHANVTPDQIAHQLIQNGKTNCSRIKMKINRVPELETHQLSSPLNLKELREAIKRCKTGKAPGLDDLMMEQIKHLGPKAENWLLKFYNQCLAHKQIPRAWRKTKIIAILKPGKDASNARNYRPISLLCHLYKVYERMLLNRLGPVIEPKLIAQQAGFRPGKNCTGQILHLTEHIEEGYEKGCITGTVFVDLTAAYDTVQHRKMLHKVYHITRDFDFTKTVQTLLENRSFYVEFQGQKSRWRRQKNGLPQGSVLAPTLFNIFTNDQPQPPLTKSFIYADDLGLTTQAKDFETVEKQLTNALKDLSSYYKENHLKPNPAKTQVCAFHLRNREANRKLKVTWEGQELEHCFHPKYLGVTLDRTLTYRKHCMNTKHKVAARNNILRKLTGSAWGADPQVIRTSALALSFSTAEYACPVWHKSAHAKQVDIALNETCRIITGCLKPTPVDKLYKLAGIAPPDVRREVAANGERKKVEHCESHPLHGYHPPPTRLKSRKGFMRTTTPLDVPPAAARVSLWAAKPGNSNWMAPQEGLPPGANQEWATWKSLNRLRSGVGRSKDNLARWHYLEESSTLCDCGAEQTTQHMYACPQCPASCTEEELFKATDNAVAVARFWSKTIGGSGSETPGTSESATPESGGSGMLRPEISSTSPSAPAVSPSSGETRSPQGPRYNFGLQETPQSRPSVQVVSASTCPGTSGAAGDRSSSSSSLPCPAPNSRPAQGS

SEQ ID NO: 277 - protein, 989 aa, synthetic construct
MRQRKRHKDEYQRSLSRPLLTIMSINIEGLSLAKEELLAKMSEDISCDILCIQETHRDITMRRPKILGMQLAVERPHRQYGSAIFVRSGVAISATSLTEVNNIEILSVELDSCTVSSLYKPPGADFYFTPPTSCHNHEAHFVVGDFNSHSCVWGYDEDDRNGEAVLTWADNSRMSLLHDSKLPPSFNSGRWKRGYNPDLIFVKESISHQCTKRVLNPIPNTQHRPICCVAYAAVRPKSVPFRRRFNFNKANWTKFTETLEAAISDIEPSIENYDLFVEAVKRSSRLSIPRGCRTSYLPGLNEESLNQLQEYLRLFQENPYSDGTIAAGQKLSTALANAKKDRWIELLENLDMSKSSRKAWQLLRRLDSDPLVNPGHANVTPDQIAHQLIQNGKTNCSRIKMKINRVPELETHQLSSPLNLKELREAIKRCKTGKAPGLDDLMMEQIKHLGPKAENWLLKFYNQCLAHKQIPRAWRKTKIIAILKPGKDASNARNYRPISLLCHLYKVYERMLLNRLGPVIEPKLIAQQAGFRPGKNCTGQILHLTEHIEEGYEKGCITGTVFVDLTAAYDTVQHRKMLHKVYHITRDFDFTKTVQTLLENRSFYVEFQGQKSRWRRQKNGLPQGSVLAPTLFNIFTNDQPQPPLTKSFIYADDLGLTTQAKDFETVEKQLTNALKDLSSYYKENHLKPNPAKTQVCAFHLRNREANRKLKVTWEGQELEHCFHPKYLGVTLDRTLTYRKHCMNTKHKVAARNNILRKLTGSAWGADPQVIRTSALALSFSTAEYACPVWHKSAHAKQVDIALNETCRIITGCLKPTPVDKLYKLAGIAPPDVRREVAANGERKKVEHCESHPLHGYHPPPTRLKSRKGFMRTTTPLDVPPAAARVSLWAAKPGNSNWMAPQEGLPPGANQEWATWKSLNRLRSGVGRSKDNLARWHYLEESSTLCDCGAEQTTQHMYACPQCPASCTEEELFKATDNAVAVARFWSKTI

SEQ ID NO: 278-292 - skipped (15 entries)

SEQ ID NO: 293 - protein, 2366 aa, synthetic construct
MAPKKKRKVGRGMDKKYSIGLDIGTNSVGWAVITDEYKVPSKKFKVLGNTDRHSIKKNLIGALLFDSGETAEATRLKRTARRRYTRRKNRICYLQEIFSNEMAKVDDSFFHRLEESFLVEEDKKHERHPIFGNIVDEVAYHEKYPTIYHLRKKLVDSTDKADLRLIYLALAHMIKFRGHFLIEGDLNPDNSDVDKLFIQLVQTYNQLFEENPINASGVDAKAILSARLSKSRRLENLIAQLPGEKKNGLFGNLIALSLGLTPNFKSNFDLAEDAKLQLSKDTYDDDLDNLLAQIGDQYADLFLAAKNLSDAILLSDILRVNTEITKAPLSASMIKRYDEHHQDLTLLKALVRQQLPEKYKEIFFDQSKNGYAGYIDGGASQEEFYKFIKPILEKMDGTEELLVKLNREDLLRKQRTFDNGSIPHQIHLGELHAILRRQEDFYPFLKDNREKIEKILTFRIPYYVGPLARGNSRFAWMTRKSEETITPWNFEEVVDKGASAQSFIERMTNFDKNLPNEKVLPKHSLLYEYFTVYNELTKVKYVTEGMRKPAFLSGEQKKAIVDLLFKTNRKVTVKQLKEDYFKKIECFDSVEISGVEDRFNASLGTYHDLLKIIKDKDFLDNEENEDILEDIVLTLTLFEDREMIEERLKTYAHLFDDKVMKQLKRRRYTGWGRLSRKLINGIRDKQSGKTILDFLKSDGFANRNFMQLIHDDSLTFKEDIQKAQVSGQGDSLHEHIANLAGSPAIKKGILQTVKVVDELVKVMGRHKPENIVIEMARENQTTQKGQKNSRERMKRIEEGIKELGSQILKEHPVENTQLQNEKLYLYYLQNGRDMYVDQELDINRLSDYDVDHIVPQSFLKDDSIDNKVLTRSDKNRGKSDNVPSEEVVKKMKNYWRQLLNAKLITQRKFDNLTKAERGGLSELDKAGFIKRQLVETRQITKHVAQILDSRMNTKYDENDKLIREVKVITLKSKLVSDFRKDFQFYKVREINNYHHAHDAYLNAVVGTALIKKYPKLESEFVYGDYKVYDVRKMIAKSEQEIGKATAKYFFYSNIMNFFKTEITLANGEIRKRPLIETNGETGEIVWDKGRDFATVRKVLSMPQVNIVKKTEVQTGGFSKESILPKRNSDKLIARKKDWDPKKYGGFDSPTVAYSVLVVAKVEKGKSKKLKSVKELLGITIMERSSFEKNPIDFLEAKGYKEVKKDLIIKLPKYSLFELENGRKRMLASAGELQKGNELALPSKYVNFLYLASHYEKLKGSPEDNEQKQLFVEQHKHYLDEIIEQISEFSKRVILADANLDKVLSAYNKHRDKPIREQAENIIHLFTLTNLGAPAAFKYFDTTIDRKRYTSTKEVLDATLIHQSITGLYETRIDLSQLGGDGGSGSETPGTSESATPESGGSGCFLIPVVTNTRKTREVRCKRNPHNLRSIHVSTISQLSLSVGLWNCQSAVNKADFITSIATYSDYNLMALTETWLRPEDTATHATLSANFSFSHTPRQTGRGGGTGLLISKEWKFTLIPSLPTISSFEFHAVTIIHPFYINVVVIYRPPGKLGHFLDELDVLLSSFSNFDTPLLVLGDFNIYVDKPQAADFQTLLASFDLKRAPTSATHKSGNQLDLIYTRHCFTDQTIVTPLQISDHFLLSLNIHITPEPPHTPTLVTFRRNLRSLSPNRLSTIVSDSLPPSRKLTALDSNSATNTLCSTLASCLDRLCPLASRPARASPPAPWLSDALREHRSKLRAAERIWRKTKNPAHLLTYQTLLSSFSAEVTSAKQTYYRLKINNATNPRLLFKTFSSLLYPPPPPASSTLTTDDFATFFCTKTAKISAQFAAPTTNTQDTTPTPHTLTSFSQLSESEVSKLVLSSHATTCPLDPIPSHLLQAISPAVIPTLTHIINTSLDSGLFPTTFKQARVTPLLKKPNLDHTLLENYRPVSLLPFMAKILEKVVFNQVLDFLTQNNLMDNKQSGFKKGHSTETALLSVVEDLRLAKADSKSSVLILLDLSAAFDTVNHQILLSTLESLGVAGTVIQWFRSYLSDRSFRVSWRGEVSNLQHLNTGVPQGSVLGPLLFSIYTSSLGPVIQRHGFSYHCYADDTQLYLSFHPDDPSVPARISACLLDISHWMKDHHLQLNLAKTEMLVVSANPTLHHNFSIQMDGATITASKMVKSLGVTIDDQLNFSDHISRTARSCRFALYNIRKIRPFLSEHAAQLLVQALVLSKLDYCNSLLALLPANSIKPLQLLQNAAARVVFNEPKRAHVTPLLVRLHWLPVAARIKFKTLMFAYKVTSGLAPSYLHSLLQIYVPSRNLRSVNERRLVVPSQRGKKSLSRTLTLNLPSWWNELPNCIRTAESLAIFKKRLKTQLFSLHFTS

SEQ ID NO: 294 - protein, 2366 aa, synthetic construct
MAPKKKRKVGRGMDKKYSIGLDIGTNSVGWAVITDEYKVPSKKFKVLGNTDRHSIKKNLIGALLFDSGETAEATRLKRTARRRYTRRKNRICYLQEIFSNEMAKVDDSFFHRLEESFLVEEDKKHERHPIFGNIVDEVAYHEKYPTIYHLRKKLVDSTDKADLRLIYLALAHMIKFRGHFLIEGDLNPDNSDVDKLFIQLVQTYNQLFEENPINASGVDAKAILSARLSKSRRLENLIAQLPGEKKNGLFGNLIALSLGLTPNFKSNFDLAEDAKLQLSKDTYDDDLDNLLAQIGDQYADLFLAAKNLSDAILLSDILRVNTEITKAPLSASMIKRYDEHHQDLTLLKALVRQQLPEKYKEIFFDQSKNGYAGYIDGGASQEEFYKFIKPILEKMDGTEELLVKLNREDLLRKQRTFDNGSIPHQIHLGELHAILRRQEDFYPFLKDNREKIEKILTFRIPYYVGPLARGNSRFAWMTRKSEETITPWNFEEVVDKGASAQSFIERMTNFDKNLPNEKVLPKHSLLYEYFTVYNELTKVKYVTEGMRKPAFLSGEQKKAIVDLLFKTNRKVTVKQLKEDYFKKIECFDSVEISGVEDRFNASLGTYHDLLKIIKDKDFLDNEENEDILEDIVLTLTLFEDREMIEERLKTYAHLFDDKVMKQLKRRRYTGWGRLSRKLINGIRDKQSGKTILDFLKSDGFANRNFMQLIHDDSLTFKEDIQKAQVSGQGDSLHEHIANLAGSPAIKKGILQTVKVVDELVKVMGRHKPENIVIEMARENQTTQKGQKNSRERMKRIEEGIKELGSQILKEHPVENTQLQNEKLYLYYLQNGRDMYVDQELDINRLSDYDVDAIVPQSFLKDDSIDNKVLTRSDKNRGKSDNVPSEEVVKKMKNYWRQLLNAKLITQRKFDNLTKAERGGLSELDKAGFIKRQLVETRQITKHVAQILDSRMNTKYDENDKLIREVKVITLKSKLVSDFRKDFQFYKVREINNYHHAHDAYLNAVVGTALIKKYPKLESEFVYGDYKVYDVRKMIAKSEQEIGKATAKYFFYSNIMNFFKTEITLANGEIRKRPLIETNGETGEIVWDKGRDFATVRKVLSMPQVNIVKKTEVQTGGFSKESILPKRNSDKLIARKKDWDPKKYGGFDSPTVAYSVLVVAKVEKGKSKKLKSVKELLGITIMERSSFEKNPIDFLEAKGYKEVKKDLIIKLPKYSLFELENGRKRMLASAGELQKGNELALPSKYVNFLYLASHYEKLKGSPEDNEQKQLFVEQHKHYLDEIIEQISEFSKRVILADANLDKVLSAYNKHRDKPIREQAENIIHLFTLTNLGAPAAFKYFDTTIDRKRYTSTKEVLDATLIHQSITGLYETRIDLSQLGGDGGSGSETPGTSESATPESGGSGCFLIPVVTNTRKTREVRCKRNPHNLRSIHVSTISQLSLSVGLWNCQSAVNKADFITSIATYSDYNLMALTETWLRPEDTATHATLSANFSFSHTPRQTGRGGGTGLLISKEWKFTLIPSLPTISSFEFHAVTIIHPFYINVVVIYRPPGKLGHFLDELDVLLSSFSNFDTPLLVLGDFNIYVDKPQAADFQTLLASFDLKRAPTSATHKSGNQLALIYTRHCFTDQTIVTPLQISDHFLLSLNIHITPEPPHTPTLVTFRRNLRSLSPNRLSTIVSDSLPPSRKLTALDSNSATNTLCSTLASCLDRLCPLASRPARASPPAPWLSDALREHRSKLRAAERIWRKTKNPAHLLTYQTLLSSFSAEVTSAKQTYYRLKINNATNPRLLFKTFSSLLYPPPPPASSTLTTDDFATFFCTKTAKISAQFAAPTTNTQDTTPTPHTLTSFSQLSESEVSKLVLSSHATTCPLDPIPSHLLQAISPAVIPTLTHIINTSLDSGLFPTTFKQARVTPLLKKPNLDHTLLENYRPVSLLPFMAKILEKVVFNQVLDFLTQNNLMDNKQSGFKKGHSTETALLSVVEDLRLAKADSKSSVLILLDLSAAFDTVNHQILLSTLESLGVAGTVIQWFRSYLSDRSFRVSWRGEVSNLQHLNTGVPQGSVLGPLLFSIYTSSLGPVIQRHGFSYHCYADDTQLYLSFHPDDPSVPARISACLLDISHWMKDHHLQLNLAKTEMLVVSANPTLHHNFSIQMDGATITASKMVKSLGVTIDDQLNFSDHISRTARSCRFALYNIRKIRPFLSEHAAQLLVQALVLSKLDYCNSLLALLPANSIKPLQLLQNAAARVVFNEPKRAHVTPLLVRLHWLPVAARIKFKTLMFAYKVTSGLAPSYLHSLLQIYVPSRNLRSVNERRLVVPSQRGKKSLSRTLTLNLPSWWNELPNCIRTAESLAIFKKRLKTQLFSLHFTS

SEQ ID NO: 295 - protein, 2366 aa, synthetic construct; identical to SEQ ID NO: 16

SEQ ID NO: 296 - protein, 2400 aa, synthetic construct
MKRTADGSEFESPKKKRKVDKKYSIGLDIGTNSVGWAVITDEYKVPSKKFKVLGNTDRHSIKKNLIGALLFDSGETAEATRLKRTARRRYTRRKNRICYLQEIFSNEMAKVDDSFFHRLEESFLVEEDKKHERHPIFGNIVDEVAYHEKYPTIYHLRKKLVDSTDKADLRLIYLALAHMIKFRGHFLIEGDLNPDNSDVDKLFIQLVQTYNQLFEENPINASGVDAKAILSARLSKSRRLENLIAQLPGEKKNGLFGNLIALSLGLTPNFKSNFDLAEDAKLQLSKDTYDDDLDNLLAQIGDQYADLFLAAKNLSDAILLSDILRVNTEITKAPLSASMIKRYDEHHQDLTLLKALVRQQLPEKYKEIFFDQSKNGYAGYIDGGASQEEFYKFIKPILEKMDGTEELLVKLNREDLLRKQRTFDNGSIPHQIHLGELHAILRRQEDFYPFLKDNREKIEKILTFRIPYYVGPLARGNSRFAWMTRKSEETITPWNFEEVVDKGASAQSFIERMTNFDKNLPNEKVLPKHSLLYEYFTVYNELTKVKYVTEGMRKPAFLSGEQKKAIVDLLFKTNRKVTVKQLKEDYFKKIECFDSVEISGVEDRFNASLGTYHDLLKIIKDKDFLDNEENEDILEDIVLTLTLFEDREMIEERLKTYAHLFDDKVMKQLKRRRYTGWGRLSRKLINGIRDKQSGKTILDFLKSDGFANRNFMQLIHDDSLTFKEDIQKAQVSGQGDSLHEHIANLAGSPAIKKGILQTVKVVDELVKVMGRHKPENIVIEMARENQTTQKGQKNSRERMKRIEEGIKELGSQILKEHPVENTQLQNEKLYLYYLQNGRDMYVDQELDINRLSDYDVDAIVPQSFLKDDSIDNKVLTRSDKNRGKSDNVPSEEVVKKMKNYWRQLLNAKLITQRKFDNLTKAERGGLSELDKAGFIKRQLVETRQITKHVAQILDSRMNTKYDENDKLIREVKVITLKSKLVSDFRKDFQFYKVREINNYHHAHDAYLNAVVGTALIKKYPKLESEFVYGDYKVYDVRKMIAKSEQEIGKATAKYFFYSNIMNFFKTEITLANGEIRKRPLIETNGETGEIVWDKGRDFATVRKVLSMPQVNIVKKTEVQTGGFSKESILPKRNSDKLIARKKDWDPKKYGGFDSPTVAYSVLVVAKVEKGKSKKLKSVKELLGITIMERSSFEKNPIDFLEAKGYKEVKKDLIIKLPKYSLFELENGRKRMLASAGELQKGNELALPSKYVNFLYLASHYEKLKGSPEDNEQKQLFVEQHKHYLDEIIEQISEFSKRVILADANLDKVLSAYNKHRDKPIREQAENIIHLFTLTNLGAPAAFKYFDTTIDRKRYTSTKEVLDATLIHQSITGLYETRIDLSQLGGDSGGSSGGSSGSETPGTSESATPESSGGSSGGSSDEYQRSLSRPLLTIMSINIEGLSLAKEELLAKMSEDISCDILCIQETHRDITMRRPKILGMQLAVERPHRQYGSAIFVRSGVAISATSLTEVNNIEILSVELDSCTVSSLYKPPGADFYFTPPTSCHNHEAHFVVGDFNSHSCVWGYDEDDRNGEAVLTWADNSRMSLLHDSKLPPSFNSGRWKRGYNPALIFVKESISHQCTKRVLNPIPNTQHRPICCVAYAAVRPKSVPFRRRFNFNKANWTKFTETLEAAISDIEPSIENYDLFVEAVKRSSRLSIPRGCRTSYLPGLNEESLNQLQEYLRLFQENPYSDGTIAAGQKLSTALANAKKDRWIELLENLDMSKSSRKAWQLLRRLDSDPLVNPGHANVTPDQIAHQLIQNGKTNCSRIKMKINRVPELETHQLSSPLNLKELREAIKRCKTGKAPGLDDLMMEQIKHLGPKAENWLLKFYNQCLAHKQIPRAWRKTKIIAILKPGKDASNARNYRPISLLCHLYKVYERMLLNRLGPVIEPKLIAQQAGFRPGKNCTGQILHLTEHIEEGYEKGCITGTVFVDLTAAYDTVQHRKMLHKVYHITRDFDFTKTVQTLLENRSFYVEFQGQKSRWRRQKNGLPQGSVLAPTLFNIFTNDQPQPPLTKSFIYADDLGLTTQAKDFETVEKQLTNALKDLSSYYKENHLKPNPAKTQVCAFHLRNREANRKLKVTWEGQELEHCFHPKYLGVTLDRTLTYRKHCMNTKHKVAARNNILRKLTGSAWGADPQVIRTSALALSFSTAEYACPVWHKSAHAKQVDIALNETCRIITGCLKPTPVDKLYKLAGIAPPDVRREVAANGERKKVEHCESHPLHGYHPPPTRLKSRKGFMRTTTPLDVPPAAARVSLWAAKPGNSNWMAPQEGLPPGANQEWATWKSLNRLRSGVGRSKDNLARWHYLEESSTLCDCGAEQTTQHMYACPQCPASCTEEELFKATDNAVAVARFWSKTI

SEQ ID NO: 297 - protein, 2400 aa, synthetic construct; identical to SEQ ID NO: 259

SEQ ID NO: 298 - protein, 2400 aa, synthetic construct; identical to SEQ ID NO: 259

SEQ ID NO: 299 - protein, 2400 aa, synthetic construct; identical to SEQ ID NO: 259

SEQ ID NO: 300 - protein, 2400 aa, synthetic construct; identical to SEQ ID NO: 259

SEQ ID NO: 301 - protein, 2400 aa, synthetic construct; identical to SEQ ID NO: 259

SEQ ID NO: 302 - protein, 2400 aa, synthetic construct; identical to SEQ ID NO: 259

SEQ ID NO: 303 - protein, 2400 aa, synthetic construct; identical to SEQ ID NO: 259

SEQ ID NO: 304 - protein, 2400 aa, synthetic construct; identical to SEQ ID NO: 259

SEQ ID NO: 305 - protein, 2400 aa, synthetic construct; identical to SEQ ID NO: 259

SEQ ID NO: 306 - protein, 2400 aa, synthetic construct; identical to SEQ ID NO: 259

SEQ ID NO: 307 - protein, 2400 aa, synthetic construct; identical to SEQ ID NO: 259

SEQ ID NO: 308 - protein, 33 aa, synthetic construct
PTLLGFHTASGKKVKIAKESLDKVKNLFDEKEQ

SEQ ID NO: 309 - protein, 69 aa, synthetic construct
SEKKQPVDLGLLEEDDEFEEFPAEDWAGLDEDEDAHVWEDNWDDDNVEDDFSNQLRAELEKHGYKMETS

SEQ ID NO: 310 - protein, 296 aa, synthetic construct
NISGSSCGSPNSADTSSDFKDLWTKLKECHDREVQGLQVKVTKLKQERILDAQRLEEFFTKNQQLREQQKVLHETIKVLEDRLRAGLCDRCAVTEEHMRKKQQEFENIRQQNLKLITELMNERNTLQEENKKLSEQLQQKIENDQQHQAAELECEEDVIPDSPITAFSFSGVNRLRRKENPHVRYIEQTHTKLEHSVCANEMRKVSKSSTHPQHNPNENEILVADTYDQSQSPMAKAHGTSSYTPDKSSFNLATVVAETLGLGVQEESETQGPMSPLGDELYHCLEGNHKKQPFES

SEQ ID NO: 311 - protein, 346 aa, synthetic construct
GIHGVPAAAMQMQLEANADTSVEEESFGPQPISRLEQCGINANDVKKLEEAGFHTVEAVAYAPKKELINIKGISEAKADKILAEAAKLVPMGFTTETEFHQRRSEIIQITTGSKELDKLLQGGIETGSITEMFGEFRTGKTQICHTLAVTCQLPIDRGGGEGKAMYIDTEGTFRPERLLAVAERYGLSGSDVLDNVAYARAFNTDHQTQLLYQASAMMVESRYALLIVDSATALYRTDYSGRGELSARQMHLARFLRMLLRLADEFGVAVVITNQVVAQVDGAAMFAADPKKPIGGNIIAHASTTRLYLRKGRGETRICKIYDSPCLPEAEAMFAINADGVGDAKD

SEQ ID NO: 312 - protein, 31 aa, synthetic construct
KNSTSRNPSGINDDYGQLKNFKKFKKVTYGS

SEQ ID NO: 313 - protein, 126 aa, synthetic construct
CNTNMSVPTDGAVTTSQIPASEQETLVRPKPLLLKLLKSVGAQKDTYTMKEVLFYLGQYIMTKRLYDEKQQHIVYCSNDLLGDLFGVPSFSVKEHRKIYTMIYRNLVVVNQQESSDSGTSVSENGS

SEQ ID NO: 314 - protein, 22 aa, synthetic construct
YGFRLGFLHSGTAKSVTCTYGS

SEQ ID NO: 315 - protein, 60 aa, synthetic construct
LQSCMQFQPNSPASDLEAALEAAGEGLNVIQQTTRYFSTPQTMDLFLNYSMNMQPEDVGS

SEQ ID NO: 316 - protein, 156 aa, synthetic construct
LKQVEIFTDGSCLGNPGPGGYGAILRYRGREKTFSAGYTRTTNNRMELMAAIVALEALKEHCEVILSTDSQYVRQGITQWIHNWKKRGWKTADKKPVKNVDLWQRLDAALGQHQIKWEWVKGHAGHPENERCDELARAAAMNPTLEDTGYQVEVGS

SEQ ID NO: 317 - protein, 152 aa, synthetic construct
GDFVVVYTDGCCSSNGRRRPRAGIGVYWGPGHPLNVGIRLPGRQTNQRAEIHAACKAIEQAKTQNINKLVLYTDSMFTINGITNWVQGWKKNGWKTSAGKEVINKEDFVALERLTQGMDIQWMHVPGHSGFIGNEEADRLAREGAKQSEDGS

SEQ ID NO: 318 - protein, 265 aa, synthetic construct
GIHGVPAAMAERPFQCRICMRNFSYNWHLQRHIRTHTGEKPFACDICGRKFARSDHLTTHTKIHTGSQKPFQCRICMRNFSHNYARDCHIRTHTGEKPFACDICGRKFAQNSTRIGHTKIHLRGSSGSETPGTSESATPEGIHGVPAAMAERPFQCRICMRNFSQSSNLARHIRTHTGEKPFACDICGRKFARTDYLVDHTKIHTGSQKPFQCRICMRNFSYNTHLTRHIRTHTGEKPFACDICGRKFAQGYNLAGHTKIHLRGS

SEQ ID NO: 319 - DNA, 4612 bp, synthetic construct
  source 1..4612: mol_type = other DNA
tcgcgcgtttcggtgatgacggtgaaaacctctgacacatgcagctcccggagacggtcacagcttgtctgtaagcggatgccgggagcagacaagcccgtcagggcgcgtcagcgggtgttggcgggtgtcggggctggcttaactatgcggcatcagagcagattgtactgagagtgcaccatatgcggtgtgaaataccgcacagatgcgtaaggagaaaataccgcatcaggcgccattcgccattcaggctgcgcaactgttgggaagggcgatcggtgcgggcctcttcgctattacgccagctggcgaaagggggatgtgctgcaaggcgattaagttgggtaacgccagggttttcccagtcacgacgttgtaaaacgacggccagtgaattggagatcggtacttcgcgaatgcgtcgagattgcagggtcgactaatacgactcactataagggcggcctactcgacggatcgatccgaacaaacgacccaacacccgtgcgttttattctgtctttttattgccgatcccctcagaagaactcgtcaagaaggcgatagaaggcgatgcgctgcgaatcgggagcggcgataccgtaaagcacgaggaagcggtcagcccattcgccgccaagctcttcagcaatatcacgggtagccaacgctatgtcctgatagcggtcggccgctttacttgtacagctcgtccatgccgagagtgatcccggcggcggtcacgaactccagcaggaccatgtgatcgcgcttctcgttggggtctttgctcagggcggactgggtgctcaggtagtggttgtcgggcagcagcacggggccgtcgccgatgggggtgttctgctggtagtggtcggccagctgcacgctgccgtcctcgatgttgtggcggatcttgaagttcaccttgatgccgttcttctgcttgtcggccatgatatagacgttgtggctgttgtagttgtactccagcttgtgccccaggatgttgccgtcctccttgaagtcgatgcccttcagctcgatgcggttcaccagggtgtcgccctcgaacttcacctcggcgcgggtcttgtagttgccgtcgtccttgaagaagatggtgcgctcctggacgtagccttcgggcatggcggacttgaagaagtcgtgctgcttcatgtggtcggggtagcggctgaagcactgcacgccgtaggtcagggtggtcacgagggtgggccagggcacgggcagcttgccggtggtgcagatgaacttcagggtcagcttgccgtaggtggcatcgccctcgccctcgccggacacgctgaacttgtggccgtttacgtcgccgtccagctcgaccaggatgggcaccaccccggtgaacagctcctcgcccttgctcaccatggtggcgaattcgaagcttgagctcgagatctgagtccggtagcgctagcggatctgacggttcactaaaccagctctgcttatatagacctcccaccgtacacgcctaccgcccatttgcgtcaatggggcggagttgttacgacattttggaaagtcccgttgattttggtgccaaaacaaactcccattgacgtcaatggggtggagacttggaaatccccgtgagtcaaaccgctatccacgcccattgatgtactgccaaaaccgcatcaccatggtaatagcgatgactaatacgtagatgtactgccaagtaggaaagtcccataaggtcatgtactgggcataatgccaggcgggccatttaccgtcattgacgtcaatagggggcgtacttggcatatgatacacttgatgtactgccaagtgggcagtttaccgtaaatactccacccattgacgtcaatggaaagtccctattggcgttactatgggaacatacgtcattattgacgtcaatgggcgggggtcgttgggcggtcagccaggcgggccatttaccgtaagttatgtaacgcggaactccatatatgggctatgaactaatgaccccgtaattgattactattaaattcctgcaggtttgggtgaaacttgcctttagtacttattcattgttgctcttagttgtgtaaattgcttccttgtcctcatttgtaagtcgctttggataaaagcgtctgctaaatgactaaatgtaaatgtaaatgtaaaggatccaaaaaaaaaaaaaaaaaaaaaaaaaaaaaaaacgttgactaaaaaaaaaaaaaaaaaaaaaaaaaaaaaaaaaaaaaaaaaaaaaaaaaaaaaaaaaaaaaaaaaaaaaaaaaagcgtcttcgcgcgcatcatcggatgccgggaccgacgagtgcagaggcgtgcaagcgagcttggcgtaatcatggtcatagctgtttcctgtgtgaaattgttatccgctcacaattccacacaacatacgagccggaagcataaagtgtaaagcctggggtgcctaatgagtgagctaactcacattaattgcgttgcgctcactgcccgctttccagtcgggaaacctgtcgtgccagctgcattaatgaatcggccaacgcgcggggagaggcggtttgcgtattgggcgctcttccgcttcctcgctcactgactcgctgcgctcggtcgttcggctgcggcgagcggtatcagctcactcaaaggcggtaatacggttatccacagaatcaggggataacgcaggaaagaacatgtgagcaaaaggccagcaaaaggccaggaaccgtaaaaaggccgcgttgctggcgtttttccataggctccgcccccctgacgagcatcacaaaaatcgacgctcaagtcagaggtggcgaaacccgacaggactataaagataccaggcgtttccccctggaagctccctcgtgcgctctcctgttccgaccctgccgcttaccggatacctgtccgcctttctcccttcgggaagcgtggcgctttctcatagctcacgctgtaggtatctcagttcggtgtaggtcgttcgctccaagctgggctgtgtgcacgaaccccccgttcagcccgaccgctgcgccttatccggtaactatcgtcttgagtccaacccggtaagacacgacttatcgccactggcagcagccactggtaacaggattagcagagcgaggtatgtaggcggtgctacagagttcttgaagtggtggcctaactacggctacactagaagaacagtatttggtatctgcgctctgctgaagccagttaccttcggaaaaagagttggtagctcttgatccggcaaacaaaccaccgctggtagcggtggtttttttgtttgcaagcagcagattacgcgcagaaaaaaaggatctcaagaagatcctttgatcttttctacggggtctgacgctcagtggaacgaaaactcacgttaagggattttggtcatgagattatcaaaaaggatcttcacctagatccttttaaattaaaaatgaagttttaaatcaatctaaagtatatatgagtaaacttggtctgacagttaccaatgcttaatcagtgaggcacctatctcagcgatctgtctatttcgttcatccatagttgcctgactccccgtcgtgtagataactacgatacgggagggcttaccatctggccccagtgctgcaatgataccgcgagacccacgctcaccggctccagatttatcagcaataaaccagccagccggaagggccgagcgcagaagtggtcctgcaactttatccgcctccatccagtctattaattgttgccgggaagctagagtaagtagttcgccagttaatagtttgcgcaacgttgttgccattgctacaggcatcgtggtgtcacgctcgtcgtttggtatggcttcattcagctccggttcccaacgatcaaggcgagttacatgatcccccatgttgtgcaaaaaagcggttagctccttcggtcctccgatcgttgtcagaagtaagttggccgcagtgttatcactcatggttatggcagcactgcataattctcttactgtcatgccatccgtaagatgcttttctgtgactggtgagtactcaaccaagtcattctgagaatagtgtatgcggcgaccgagttgctcttgcccggcgtcaatacgggataataccgcgccacatagcagaactttaaaagtgctcatcattggaaaacgttcttcggggcgaaaactctcaaggatcttaccgctgttgagatccagttcgatgtaacccactcgtgcacccaactgatcttcagcatcttttactttcaccagcgtttctgggtgagcaaaaacaggaaggcaaaatgccgcaaaaaagggaataagggcgacacggaaatgttgaatactcatactcttcctttttcaatattattgaagcatttatcagggttattgtctcatgagcggatacatatttgaatgtatttagaaaaataaacaaataggggttccgcgcacatttccccgaaaagtgccacctgacgtctaagaaaccattattatcatgacattaacctataaaaataggcgtatcacgaggccctttcgtc

SEQ ID NO: 320 - DNA, 6076 bp, synthetic construct
  source 1..6076: mol_type = other DNA
tcgcgcgtttcggtgatgacggtgaaaacctctgacacatgcagctcccggagacggtcacagcttgtctgtaagcggatgccgggagcagacaagcccgtcagggcgcgtcagcgggtgttggcgggtgtcggggctggcttaactatgcggcatcagagcagattgtactgagagtgcaccatatgcggtgtgaaataccgcacagatgcgtaaggagaaaataccgcatcaggcgccattcgccattcaggctgcgcaactgttgggaagggcgatcggtgcgggcctcttcgctattacgccagctggcgaaagggggatgtgctgcaaggcgattaagttgggtaacgccagggttttcccagtcacgacgttgtaaaacgacggccagtgaattggagatcggtacttcgcgaatgcgtcgagattgcagggtcgactaatacgactcactataaggagagatatccctagctagttcaccgcggcagcggtcgcggcagcctcgtgtgaggaccgacgagggtaaagaccatcgactctacctgcgcgactccaccgagcaaagacaccgacaaagcacttgagtactttactttattgttttactttacacttattttttgttgtcagtgcacttttattatgtgttttctaattcctgttgttactaacactcgcaaaacacgggaggtacgctgcaagcgtaatcctcacaaccttcgttcaatacatgtatctactatttcacaactctctctctccgtgggcctctggaattgtcaatcagctgttaacaaggctgattttattacctccatagctacatattctgactataatctcatggctctaactgagacctggttgaggccggaggacactgctacacatgctactctttctgctaatttctctttttcccacactcctcgtcagacagggagagggggtgggactggactactaatttccaaagaatggaaatttactctgataccgtccctgccaacaatcagctcctttgaattccatgcagtcaccattatccaccccttctacataaatgtggttgtcatctaccgcccaccaggtaaattaggtcacttcctagatgaactggatgttcttctctcatctttttctaattttgacactcccttattggtgctaggtgacttcaacatttacgttgacaaaccgcaagctgcagactttcagactttgcttgcctcttttgacctaaaaagagcacctacttctgctacccacaaatcaggtaatcagctagaccttatttacacacgacactgcttcactgatcaaacaatagtaactccactacaaatatctgatcatttccttctgtctctcaacatccacattactcctgagccgccacacactcctacactggttacctttcgcagaaacctacgatctctctcacccaatagactatccaccattgtttcagactctcttcctccatctcgcaaactcactgcacttgattcgaacagtgccactaatacactctgctccacactagcatcatgtctagaccgattatgtcctcttgcatccaggccagcccgtgccagtcctcctgcaccctggctctcggatgctctccgtgagcatcgctcaaaacttcgggctgcggagagaatttggcggaaaactaaaaatcctgcacatctcttaacataccaaactcttctgtcctctttctcagctgaggttacttctgcaaagcagacgtattaccgtctgaaaatcaacaatgccactaatcctcgcctactttttaaaacattttcctccctcctatatcctcctcctccacccgcatcctccacacttactactgatgactttgctacattcttctgcaccaaaactgcaaaaatcagtgctcaatttgctgcacctacaacaaacacgcaagatacaacaccaacaccacacacactcacctctttttctcagctctctgagtctgaggtgtccaaacttgtgctatctagccatgcaaccacctgtccactcgatcccattccctctcatctcttgcaagccatctctcctgcagtcataccaacactgactcacataattaacacatctcttgactctggtttattccccactacatttaagcaggctagggtaaccccactgctaaagaaacccaacctggaccatacgctacttgaaaactacagaccagtatccctgcttccattcatggccaagattctggagaaagtagtgttcaatcaagtcctggactttcttactcaaaacaatctcatggacaacaagcaatccggctttaagaaaggccactcaactgagactgccctgctctcggtcgtggaggatctcagactggctaaagcagactctaaatcatcagtcctcattttgctggacttgtcagctgcttttgacactgtcaaccaccagatcctgctatctacgcttgagtcactgggcgttgcgggcactgttatacaatggtttagatcttacctctctgacaggtcattcagggtgtcttggaggggagaggtgtccaacctacagcatctaaacactggggtacctcaaggctctgttcttgggccacttctcttctccatctacacatcatctctaggaccagtcatccagagacatggattctcctaccactgctatgctgatgacacccagctatacctctcttttcatcctgatgatccctcggttccagctcgtatctcagcctgcctgttggatatttcacactggatgaaagatcatcatcttcagctgaacctcgcaaaaacggaaatgcttgtagtttctgccaacccgactctacaccataacttttcaatccagatggatggggcaaccattactgcatccaaaatggtgaaaagccttggagtaacgattgatgaccaactaaacttctctgaccacatttctagaactgctcgatcgtgcagatttgcactctataacatcagaaagatccgacccttcttatctgaacatgcagctcaactccttgttcaagctcttgttctctccaaactggattactgcaactctctactagctttgcttccagctaactctatcaagcctcttcaactgctccagaatgcagcagcacgagttgtgttcaatgaacctaaacgagcacatgtcactccgctgctagtccgtttgcactggctgccagttgctgctcgcatcaaattcaaaactctgatgtttgcctacaaagtgacttctggcctagcaccttcttatctgcactcacttctgcagatctatgtgccctccagaaacttgcgttctgtgaatgaacgtcgcctcgtggttccatcccaaagagggaaaaaatcactttcgcgaacgctcacgctcaatctgcccagttggtggaatgaactccctaactgcatcagaacagcagagtcactcgctattttcaagaaacgactaaaaactcaactatttagtctccacttcacttcctgataataggctgcaattgcctctttgaatatcacactaattgtacaaaaaaaaaaaaaaaaaaaaaaaaaactactaacacttcccttcttagactttacagaccgcggcctactcggatccaaaaaaaaaaaaaaaaaaaaaaaaaaaaaaaacgttgactaaaaaaaaaaaaaaaaaaaaaaaaaaaaaaaaaaaaaaaaaaaaaaaaaaaaaaaaaaaaaaaaaaaaaaaaaagcgtcttcgcgcgcatcatcggatgccgggaccgacgagtgcagaggcgtgcaagcgagcttggcgtaatcatggtcatagctgtttcctgtgtgaaattgttatccgctcacaattccacacaacatacgagccggaagcataaagtgtaaagcctggggtgcctaatgagtgagctaactcacattaattgcgttgcgctcactgcccgctttccagtcgggaaacctgtcgtgccagctgcattaatgaatcggccaacgcgcggggagaggcggtttgcgtattgggcgctcttccgcttcctcgctcactgactcgctgcgctcggtcgttcggctgcggcgagcggtatcagctcactcaaaggcggtaatacggttatccacagaatcaggggataacgcaggaaagaacatgtgagcaaaaggccagcaaaaggccaggaaccgtaaaaaggccgcgttgctggcgtttttccataggctccgcccccctgacgagcatcacaaaaatcgacgctcaagtcagaggtggcgaaacccgacaggactataaagataccaggcgtttccccctggaagctccctcgtgcgctctcctgttccgaccctgccgcttaccggatacctgtccgcctttctcccttcgggaagcgtggcgctttctcatagctcacgctgtaggtatctcagttcggtgtaggtcgttcgctccaagctgggctgtgtgcacgaaccccccgttcagcccgaccgctgcgccttatccggtaactatcgtcttgagtccaacccggtaagacacgacttatcgccactggcagcagccactggtaacaggattagcagagcgaggtatgtaggcggtgctacagagttcttgaagtggtggcctaactacggctacactagaagaacagtatttggtatctgcgctctgctgaagccagttaccttcggaaaaagagttggtagctcttgatccggcaaacaaaccaccgctggtagcggtggtttttttgtttgcaagcagcagattacgcgcagaaaaaaaggatctcaagaagatcctttgatcttttctacggggtctgacgctcagtggaacgaaaactcacgttaagggattttggtcatgagattatcaaaaaggatcttcacctagatccttttaaattaaaaatgaagttttaaatcaatctaaagtatatatgagtaaacttggtctgacagttaccaatgcttaatcagtgaggcacctatctcagcgatctgtctatttcgttcatccatagttgcctgactccccgtcgtgtagataactacgatacgggagggcttaccatctggccccagtgctgcaatgataccgcgagacccacgctcaccggctccagatttatcagcaataaaccagccagccggaagggccgagcgcagaagtggtcctgcaactttatccgcctccatccagtctattaattgttgccgggaagctagagtaagtagttcgccagttaatagtttgcgcaacgttgttgccattgctacaggcatcgtggtgtcacgctcgtcgtttggtatggcttcattcagctccggttcccaacgatcaaggcgagttacatgatcccccatgttgtgcaaaaaagcggttagctccttcggtcctccgatcgttgtcagaagtaagttggccgcagtgttatcactcatggttatggcagcactgcataattctcttactgtcatgccatccgtaagatgcttttctgtgactggtgagtactcaaccaagtcattctgagaatagtgtatgcggcgaccgagttgctcttgcccggcgtcaatacgggataataccgcgccacatagcagaactttaaaagtgctcatcattggaaaacgttcttcggggcgaaaactctcaaggatcttaccgctgttgagatccagttcgatgtaacccactcgtgcacccaactgatcttcagcatcttttactttcaccagcgtttctgggtgagcaaaaacaggaaggcaaaatgccgcaaaaaagggaataagggcgacacggaaatgttgaatactcatactcttcctttttcaatattattgaagcatttatcagggttattgtctcatgagcggatacatatttgaatgtatttagaaaaataaacaaataggggttccgcgcacatttccccgaaaagtgccacctgacgtctaagaaaccattattatcatgacattaacctataaaaataggcgtatcacgaggccctttcgtc

SEQ ID NO: 321 - DNA, 7207 bp, synthetic construct
  source 1..7207: mol_type = other DNA
tcgcgcgtttcggtgatgacggtgaaaacctctgacacatgcagctcccggagacggtcacagcttgtctgtaagcggatgccgggagcagacaagcccgtcagggcgcgtcagcgggtgttggcgggtgtcggggctggcttaactatgcggcatcagagcagattgtactgagagtgcaccatatgcggtgtgaaataccgcacagatgcgtaaggagaaaataccgcatcaggcgccattcgccattcaggctgcgcaactgttgggaagggcgatcggtgcgggcctcttcgctattacgccagctggcgaaagggggatgtgctgcaaggcgattaagttgggtaacgccagggttttcccagtcacgacgttgtaaaacgacggccagtgaattggagatcggtacttcgcgaatgcgtcgagattgcagggtcgactaatacgactcactataaggagagatatccctagctagttcaccgcggcagcggtcgcggcagcctcgtgtgaggaccgacgagggtaaagaccatcgactctacctgcgcgactccaccgagcaaagacaccgacaaagcacttgagtactttactttattgttttactttacacttattttttgttgtcagtgcacttttattatgcctaagagaaaggtgtccagcgccgagggcgctgccaaggaagagcctaaacggagaagcgccagactgagcgccaagccccccgccaaggtggaagccaagcctaagaaggccgccgctaaggacaagagcagcgataagaaagtccagaccaagggcaagcggggcgccaaaggcaaacaggccgaggtggccaaccaggagacaaaggaagatctgcctgctgagaacggcgaaaccaagaccgaggaatctccagcttctgacgaggccggagagaaggaggccaaaagcgacagcggctctgagacacctggaacaagcgagagcgccaccccggaatcctgttttctaattcctgttgttactaacactcgcaaaacacgggaggtacgctgcaagcgtaatcctcacaaccttcgttcaatacatgtatctactatttcacaactctctctctccgtgggcctctggaattgtcaatcagctgttaacaaggctgattttattacctccatagctacatattctgactataatctcatggctctaactgagacctggttgaggccggaggacactgctacacatgctactctttctgctaatttctctttttcccacactcctcgtcagacagggagagggggtgggactggactactaatttccaaagaatggaaatttactctgataccgtccctgccaacaatcagctcctttgaattccatgcagtcaccattatccaccccttctacataaatgtggttgtcatctaccgcccaccaggtaaattaggtcacttcctagatgaactggatgttcttctctcatctttttctaattttgacactcccttattggtgctaggtgacttcaacatttacgttgacaaaccgcaagctgcagactttcagactttgcttgcctcttttgacctaaaaagagcacctacttctgctacccacaaatcaggtaatcagctagaccttatttacacacgacactgcttcactgatcaaacaatagtaactccactacaaatatctgatcatttccttctgtctctcaacatccacattactcctgagccgccacacactcctacactggttacctttcgcagaaacctacgatctctctcacccaatagactatccaccattgtttcagactctcttcctccatctcgcaaactcactgcacttgattcgaacagtgccactaatacactctgctccacactagcatcatgtctagaccgattatgtcctcttgcatccaggccagcccgtgccagtcctcctgcaccctggctctcggatgctctccgtgagcatcgctcaaaacttcgggctgcggagagaatttggcggaaaactaaaaatcctgcacatctcttaacataccaaactcttctgtcctctttctcagctgaggttacttctgcaaagcagacgtattaccgtctgaaaatcaacaatgccactaatcctcgcctactttttaaaacattttcctccctcctatatcctcctcctccacccgcatcctccacacttactactgatgactttgctacattcttctgcaccaaaactgcaaaaatcagtgctcaatttgctgcacctacaacaaacacgcaagatacaacaccaacaccacacacactcacctctttttctcagctctctgagtctgaggtgtccaaacttgtgctatctagccatgcaaccacctgtccactcgatcccattccctctcatctcttgcaagccatctctcctgcagtcataccaacactgactcacataattaacacatctcttgactctggtttattccccactacatttaagcaggctagggtaaccccactgctaaagaaacccaacctggaccatacgctacttgaaaactacagaccagtatccctgcttccattcatggccaagattctggagaaagtagtgttcaatcaagtcctggactttcttactcaaaacaatctcatggacaacaagcaatccggctttaagaaaggccactcaactgagactgccctgctctcggtcgtggaggatctcagactggctaaagcagactctaaatcatcagtcctcattttgctggacttgtcagctgcttttgacactgtcaaccaccagatcctgctatctacgcttgagtcactgggcgttgcgggcactgttatacaatggtttagatcttacctctctgacaggtcattcagggtgtcttggaggggagaggtgtccaagctacagcatctaaacactggggtacctcaaggctctgttcttgggccacttctcttctccatctacacatcatctctaggaccagtcatccagagacatggattctcctaccactgctatgctgatgacacccagctatacctctcttttcatcctgatgatccctcggttccagctcgtatctcagcctgcctgttggatatttcacactggatgaaagatcatcatcttcagctgaacctcgcaaaaacggaaatgcttgtagtttctgccaacccgactctacaccataacttttcaatccagatggatggggcaaccattactgcatccaaaatggtgaaaagccttggagtaacgattgatgaccaactaaacttctctgaccacatttctagaactgctcgatcgtgcagatttgcactctataacatcagaaagatccgacccttcttatctgaacatgcagctcaactccttgttcaagctcttgttctctccaaactggattactgcaactctctactagctttgcttccagctaactctatcaagcctcttcaactgctccagaatgcagcagcacgagttgtgttcaatgaacctaaacgagcacatgtcactccgctgctagtccgtttgcactggctgccagttgctgctcgcatcaaattcaaaactctgatgtttgcctacaaagtgacttctggcctagcaccttcttatctgcactcacttctgcagatctatgtgccctccagaaacttgcgttctgtgaatgaacgtcgcctcgtggttccatcccaaagagggaaaaaatcactttcgcgaacgctcacgctcaatctgcccagttggtggaatgaactccctaactgcatcagaacagcagagtcactcgctattttcaagaaacgactaaaaactcaactatttagtctccacttcacttcctccggctccgagactcctggaacaagcgagagcgctacacctgagggcagcgaaagcacagtcggccctgcttgccccccaggaagaaccgtgaccaagcggccctgggccctggccgaggacacccctaggggccccgatagcccccccaaaagaccccggcctaacagcctgcctctgaccacaacattcagacctctgcctcctccacctcagaccaccagcgccgtggaccctagcagccactcccctgtgaacccccctcgggaccagcacgccacagataccgccgacgagaagcccagagccgcttctccagccctgagcgacgccagcggacctcctacccctgacatccccctgtctcctggcggcacccacgccagagatcctgatgctgatcctgactctccagacctggacagctccggctccgagactcctggaacaagcgagagcgctacacctgagggaaaaggcgaccccaagaaacctagaggcaagatgagcagctacgcctttttcgtgcagacctgtcgggaagagcacaagaaaaagcaccctgacgccagcgtgaacttctctgagttcagcaagaagtgcagcgagagatggaaaacaatgtccgccaaggaaaagggcaagttcgaggacatggccaaggctgataaggccagatacgagcgggaaatgaaaacctacatcccacctaagggcgagggcggatctggcaaaagaaccgctgatggcagcgagttcgagagccccaagaaaaagagaaaggtgtgataataggctgcaattgcctctttgaatatcacactaattgtacaaaaaaaaaaaaaaaaaaaaaaaaaactactaacacttcccttcttagactttacagaccgcggcctactcggatccaaaaaaaaaaaaaaaaaaaaaaaaaaaaaaaacgttgactaaaaaaaaaaaaaaaaaaaaaaaaaaaaaaaaaaaaaaaaaaaaaaaaaaaaaaaaaaaaaaaaaaaaaaaaaagcgtcttcgcgcgcatcatcggatgccgggaccgacgagtgcagaggcgtgcaagcgagcttggcgtaatcatggtcatagctgtttcctgtgtgaaattgttatccgctcacaattccacacaacatacgagccggaagcataaagtgtaaagcctggggtgcctaatgagtgagctaactcacattaattgcgttgcgctcactgcccgctttccagtcgggaaacctgtcgtgccagctgcattaatgaatcggccaacgcgcggggagaggcggtttgcgtattgggcgctcttccgcttcctcgctcactgactcgctgcgctcggtcgttcggctgcggcgagcggtatcagctcactcaaaggcggtaatacggttatccacagaatcaggggataacgcaggaaagaacatgtgagcaaaaggccagcaaaaggccaggaaccgtaaaaaggccgcgttgctggcgtttttccataggctccgcccccctgacgagcatcacaaaaatcgacgctcaagtcagaggtggcgaaacccgacaggactataaagataccaggcgtttccccctggaagctccctcgtgcgctctcctgttccgaccctgccgcttaccggatacctgtccgcctttctcccttcgggaagcgtggcgctttctcatagctcacgctgtaggtatctcagttcggtgtaggtcgttcgctccaagctgggctgtgtgcacgaaccccccgttcagcccgaccgctgcgccttatccggtaactatcgtcttgagtccaacccggtaagacacgacttatcgccactggcagcagccactggtaacaggattagcagagcgaggtatgtaggcggtgctacagagttcttgaagtggtggcctaactacggctacactagaagaacagtatttggtatctgcgctctgctgaagccagttaccttcggaaaaagagttggtagctcttgatccggcaaacaaaccaccgctggtagcggtggtttttttgtttgcaagcagcagattacgcgcagaaaaaaaggatctcaagaagatcctttgatcttttctacggggtctgacgctcagtggaacgaaaactcacgttaagggattttggtcatgagattatcaaaaaggatcttcacctagatccttttaaattaaaaatgaagttttaaatcaatctaaagtatatatgagtaaacttggtctgacagttaccaatgcttaatcagtgaggcacctatctcagcgatctgtctatttcgttcatccatagttgcctgactccccgtcgtgtagataactacgatacgggagggcttaccatctggccccagtgctgcaatgataccgcgagacccacgctcaccggctccagatttatcagcaataaaccagccagccggaagggccgagcgcagaagtggtcctgcaactttatccgcctccatccagtctattaattgttgccgggaagctagagtaagtagttcgccagttaatagtttgcgcaacgttgttgccattgctacaggcatcgtggtgtcacgctcgtcgtttggtatggcttcattcagctccggttcccaacgatcaaggcgagttacatgatcccccatgttgtgcaaaaaagcggttagctccttcggtcctccgatcgttgtcagaagtaagttggccgcagtgttatcactcatggttatggcagcactgcataattctcttactgtcatgccatccgtaagatgcttttctgtgactggtgagtactcaaccaagtcattctgagaatagtgtatgcggcgaccgagttgctcttgcccggcgtcaatacgggataataccgcgccacatagcagaactttaaaagtgctcatcattggaaaacgttcttcggggcgaaaactctcaaggatcttaccgctgttgagatccagttcgatgtaacccactcgtgcacccaactgatcttcagcatcttttactttcaccagcgtttctgggtgagcaaaaacaggaaggcaaaatgccgcaaaaaagggaataagggcgacacggaaatgttgaatactcatactcttcctttttcaatattattgaagcatttatcagggttattgtctcatgagcggatacatatttgaatgtatttagaaaaataaacaaataggggttccgcgcacatttccccgaaaagtgccacctgacgtctaagaaaccattattatcatgacattaacctataaaaataggcgtatcacgaggccctttcgtc

SEQ ID NO: 322 - DNA, 7201 bp, synthetic construct
  source 1..7201: mol_type = other DNA
tcgcgcgtttcggtgatgacggtgaaaacctctgacacatgcagctcccggagacggtcacagcttgtctgtaagcggatgccgggagcagacaagcccgtcagggcgcgtcagcgggtgttggcgggtgtcggggctggcttaactatgcggcatcagagcagattgtactgagagtgcaccatatgcggtgtgaaataccgcacagatgcgtaaggagaaaataccgcatcaggcgccattcgccattcaggctgcgcaactgttgggaagggcgatcggtgcgggcctcttcgctattacgccagctggcgaaagggggatgtgctgcaaggcgattaagttgggtaacgccagggttttcccagtcacgacgttgtaaaacgacggccagtgaattggagatcggtacttcgcgaatgcgtcgagattgcagggtcgactaatacgactcactataaggagagatatccctagctagttcaccgcggcagcggtcgcggcagcctcgtgtgaggaccgacgagggtaaagaccatcgactctacctgcgcgactccaccgagcaaagacaccgacaaagcacttgagtactttactttattgttttactttacacttattttttgttgtcagtgcacttttattatgcctaagagaaaggtgtccagcgccgagggcgctgccaaggaagagcctaaacggagaagcgccagactgagcgccaagccccccgccaaggtggaagccaagcctaagaaggccgccgctaaggacaagagcagcgataagaaagtccagaccaagggcaagcggggcgccaaaggcaaacaggccgaggtggccaaccaggagacaaaggaagatctgcctgctgagaacggcgaaaccaagaccgaggaatctccagcttctgacgaggccggagagaaggaggccaaaagcgacagcggctctgagacacctggaacaagcgagagcgccaccccggaatcctgttttctaattcctgttgttactaacactcgcaaaacacgggaggtacgctgcaagcgtaatcctcacaaccttcgttcaatacatgtatctactatttcacaactctctctctccgtgggcctctggaattgtcaatcagctgttaacaaggctgattttattacctccatagctacatattctgactataatctcatggctctaactgagacctggttgaggccggaggacactgctacacatgctactctttctgctaatttctctttttcccacactcctcgtcagacagggagagggggtgggactggactactaatttccaaagaatggaaatttactctgataccgtccctgccaacaatcagctcctttgaattccatgcagtcaccattatccaccccttctacataaatgtggttgtcatctaccgcccaccaggtaaattaggtcacttcctagatgaactggatgttcttctctcatctttttctaattttgacactcccttattggtgctaggtgacttcaacatttacgttgacaaaccgcaagctgcagactttcagactttgcttgcctcttttgacctaaaaagagcacctacttctgctacccacaaatcaggtaatcagctagaccttatttacacacgacactgcttcactgatcaaacaatagtaactccactacaaatatctgatcatttccttctgtctctcaacatccacattactcctgagccgccacacactcctacactggttacctttcgcagaaacctacgatctctctcacccaatagactatccaccattgtttcagactctcttcctccatctcgcaaactcactgcacttgattcgaacagtgccactaatacactctgctccacactagcatcatgtctagaccgattatgtcctcttgcatccaggccagcccgtgccagtcctcctgcaccctggctctcggatgctctccgtgagcatcgctcaaaacttcgggctgcggagagaaagtggcggaaaactaaaaatcctgcacatctcttaacataccaaactcttctgtcctctttctcagctgaggttacttctgcaaagcagacgtattaccgtctgaaaatcaacaatgccactaatcctcgcctactttttaaaacattttcctccctcctatatcctcctcctccacccgcatcctccacacttactactgatgactttgctacattcttctgcaccaaaactgcaaaaatcagtgctcaatttgctgcacctacaacaaacacgcaagatacaacaccaacaccacacacactcacctctttttctcagctctctgagtctgaggtgtccaaacttgtgctatctagccatgcaaccacctgtccactcgatcccattccctctcatctcttgcaagccatctctcctgcagtcataccaacactgactcacataattaacacatctcttgactctggtttattccccactacatttaagcaggctagggtaaccccactgctaaagaaacccaacctggaccatacgctacttgaaaactacagaccagtatccctgcttccattcatggccaagattctggagaaagtagtgttcaatcaagtcctggactttcttactcaaaacaatctcatggacaacaagcaatccggctttaagaaaggccactcaactgagactgccctgctctcggtcgtggaggatctcagactggctaaagcagactctaaatcatcagtcctcattttgctggacttgtcagctgcttttgacactgtcaaccaccagatcctgctatctacgcttgagtcactgggcgttgcgggcactgttatacaatggtttagatcttacctctctgacaggtcattcagggtgtcttggaggggagaggtgtccaagctacagcatctaaacactggggtacctcaaggctctgttcttgggccacttctcttctccatctacacatcatctctaggaccagtcatccagagacatggattctcctaccactgctatgctgatgacacccagctatacctctcttttcatcctgatgatccctcggttccagctcgtatctcagcctgcctgttggatatttcacactggatgaaagatcatcatcttcagctgaacctcgcaaaaacggaaatgcttgtagtttctgccaacccgactctacaccataacttttcaatccagatggatggggcaaccattactgcatccaaaatggtgaaaagccttggagtaacgattgatgaccaactaaacttctctgaccacatttctagaactgctcgatcgtgcagatttgcactctataacatcagaaagatccgacccttcttatctgaacatgcagctcaactccttgttcaagctcttgttctctccaaactggattactgcaactctctactagctttgcttccagctaactctatcaagcctcttcaactgctccagaatgcagcagcacgagttgtgttcaatgaacctaaacgagcacatgtcactccgctgctagtccgtttgcactggctgccagttgctgctcgcatcaaattcaaaactctgatgtttgcctacaaagtgacttctggcctagcaccttcttatctgcactcacttctgcagatctatgtgccctccagaaacttgcgttctgtgaatgaacgtcgcctcgtggttccatcccaaagagggaaaaaatcactttcgcgaacgctcacgctcaatctgcccagttggtggaatgaactccctaactgcatcagaacagcagagtcactcgctattttcaagaaacgactaaaaactcaactatttagtctccacttcacttcctccggctccgagactcctggaacaagcgagagcgctacacctgagggcagcgaaagcacagtcggccctgcttgccccccaggaagaaccgtgaccaagcggccctgggccctggccgaggacacccctaggggccccgatagcccccccaaaagaccccggcctaacagcctgcctctgaccacaacattcagacctctgcctcctccacctcagaccaccagcgccgtggaccctagcagccactcccctgtgaacccccctcgggaccagcacgccacagataccgccgacgagaagcccagagccgcttctccagccctgagcgacgccagcggacctcctacccctgacatccccctgtctcctggcggcacccacgccagagatcctgatgctgatcctgactctccagacctggacagctccggctccgagactcctggaacaagcgagagcgctacacctgagggaaaaggcgaccccaagaaacctagaggcaagatgagcagctacgcctttttcgtgcagacctgtcgggaagagcacaagaaaaagcaccctgacgccagcgtgaacttctctgagttcagcaagaagtgcagcgagagatggaaaacaatgtccgccaaggaaaagggcaagttcgaggacatggccaaggctgataaggccagatacgagcgggaaatgaaaacctacatcccacctaagggcgagggcggatctggcaaaagaaccgctgatggcagcgagttcgagagccccaagaaaaagagaaaggtgtaagctgcaattgcctctttgaatatcacactaattgtacaaaaaaaaaaaaaaaaaaaaaaaaaactactaacacttcccttcttagactttacagaccgcggcctactcggatccaaaaaaaaaaaaaaaaaaaaaaaaaaaaaaaacgttgactaaaaaaaaaaaaaaaaaaaaaaaaaaaaaaaaaaaaaaaaaaaaaaaaaaaaaaaaaaaaaaaaaaaaaaaaaagcgtcttcgcgcgcatcatcggatgccgggaccgacgagtgcagaggcgtgcaagcgagcttggcgtaatcatggtcatagctgtttcctgtgtgaaattgttatccgctcacaattccacacaacatacgagccggaagcataaagtgtaaagcctggggtgcctaatgagtgagctaactcacattaattgcgttgcgctcactgcccgctttccagtcgggaaacctgtcgtgccagctgcattaatgaatcggccaacgcgcggggagaggcggtttgcgtattgggcgctcttccgcttcctcgctcactgactcgctgcgctcggtcgttcggctgcggcgagcggtatcagctcactcaaaggcggtaatacggttatccacagaatcaggggataacgcaggaaagaacatgtgagcaaaaggccagcaaaaggccaggaaccgtaaaaaggccgcgttgctggcgtttttccataggctccgcccccctgacgagcatcacaaaaatcgacgctcaagtcagaggtggcgaaacccgacaggactataaagataccaggcgtttccccctggaagctccctcgtgcgctctcctgttccgaccctgccgcttaccggatacctgtccgcctttctcccttcgggaagcgtggcgctttctcatagctcacgctgtaggtatctcagttcggtgtaggtcgttcgctccaagctgggctgtgtgcacgaaccccccgttcagcccgaccgctgcgccttatccggtaactatcgtcttgagtccaacccggtaagacacgacttatcgccactggcagcagccactggtaacaggattagcagagcgaggtatgtaggcggtgctacagagttcttgaagtggtggcctaactacggctacactagaagaacagtatttggtatctgcgctctgctgaagccagttaccttcggaaaaagagttggtagctcttgatccggcaaacaaaccaccgctggtagcggtggtttttttgtttgcaagcagcagattacgcgcagaaaaaaaggatctcaagaagatcctttgatcttttctacggggtctgacgctcagtggaacgaaaactcacgttaagggattttggtcatgagattatcaaaaaggatcttcacctagatccttttaaattaaaaatgaagttttaaatcaatctaaagtatatatgagtaaacttggtctgacagttaccaatgcttaatcagtgaggcacctatctcagcgatctgtctatttcgttcatccatagttgcctgactccccgtcgtgtagataactacgatacgggagggcttaccatctggccccagtgctgcaatgataccgcgagacccacgctcaccggctccagatttatcagcaataaaccagccagccggaagggccgagcgcagaagtggtcctgcaactttatccgcctccatccagtctattaattgttgccgggaagctagagtaagtagttcgccagttaatagtttgcgcaacgttgttgccattgctacaggcatcgtggtgtcacgctcgtcgtttggtatggcttcattcagctccggttcccaacgatcaaggcgagttacatgatcccccatgttgtgcaaaaaagcggttagctccttcggtcctccgatcgttgtcagaagtaagttggccgcagtgttatcactcatggttatggcagcactgcataattctcttactgtcatgccatccgtaagatgcttttctgtgactggtgagtactcaaccaagtcattctgagaatagtgtatgcggcgaccgagttgctcttgcccggcgtcaatacgggataataccgcgccacatagcagaactttaaaagtgctcatcattggaaaacgttcttcggggcgaaaactctcaaggatcttaccgctgttgagatccagttcgatgtaacccactcgtgcacccaactgatcttcagcatcttttactttcaccagcgtttctgggtgagcaaaaacaggaaggcaaaatgccgcaaaaaagggaataagggcgacacggaaatgttgaatactcatactcttcctttttcaatattattgaagcatttatcagggttattgtctcatgagcggatacatatttgaatgtatttagaaaaataaacaaataggggttccgcgcacatttccccgaaaagtgccacctgacgtctaagaaaccattattatcatgacattaacctataaaaataggcgtatcacgaggccctttcgtc

SEQ ID NO: 323 - DNA, 7201 bp, synthetic construct
  source 1..7201: mol_type = other DNA
tcgcgcgtttcggtgatgacggtgaaaacctctgacacatgcagctcccggagacggtcacagcttgtctgtaagcggatgccgggagcagacaagcccgtcagggcgcgtcagcgggtgttggcgggtgtcggggctggcttaactatgcggcatcagagcagattgtactgagagtgcaccatatgcggtgtgaaataccgcacagatgcgtaaggagaaaataccgcatcaggcgccattcgccattcaggctgcgcaactgttgggaagggcgatcggtgcgggcctcttcgctattacgccagctggcgaaagggggatgtgctgcaaggcgattaagttgggtaacgccagggttttcccagtcacgacgttgtaaaacgacggccagtgaattggagatcggtacttcgcgaatgcgtcgagattgcagggtcgactaatacgactcactataaggagagatatccctagctagttcaccgcggcagcggtcgcggcagcctcgtgtgaggaccgacgagggtaaagaccatcgactctacctgcgcgactccaccgagcaaagacaccgacaaagcacttgagtactttactttattgttttactttacacttattttttgttgtcagtgcacttttattatgcctaagagaaaggtgtccagcgccgagggcgctgccaaggaagagcctaaacggagaagcgccagactgagcgccaagccccccgccaaggtggaagccaagcctaagaaggccgccgctaaggacaagagcagcgataagaaagtccagaccaagggcaagcggggcgccaaaggcaaacaggccgaggtggccaaccaggagacaaaggaagatctgcctgctgagaacggcgaaaccaagaccgaggaatctccagcttctgacgaggccggagagaaggaggccaaaagcgacagcggctctgagacacctggaacaagcgagagcgccaccccggaatcctgttttctaattcctgttgttactaacactcgcaaaacacgggaggtacgctgcaagcgtaatcctcacaaccttcgttcaatacatgtatctactatttcacaactctctctctccgtgggcctctggaattgtcaatcagctgttaacaaggctgattttattacctccatagctacatattctaagtataatctcatggctctaactgagacctggttgaggccggaggacactgctacacatgctactctttctgctaatttctctttttcccacactcctcgtcagacagggagagggggtgggactggactactaatttccaaagaatggaaatttactctgataccgtccctgccaacaatcagctcctttgaattccatgcagtcaccattatccaccccttctacataaatgtggttgtcatctaccgcccaccaggtaaattaggtcacttcctagatgaactggatgttcttctctcatctttttctaattttgacactcccttattggtgctaggtgacttcaacatttacgttgacaaaccgcaagctgcagactttcagactttgcttgcctcttttgacctaaaaagagcacctacttctgctacccacaaatcaggtaatcagctagaccttatttacacacgacactgcttcactgatcaaacaatagtaactccactacaaatatctgatcatttccttctgtctctcaacatccacattactcctgagccgccacacactcctacactggttacctttcgcagaaacctacgatctctctcacccaatagactatccaccattgtttcagactctcttcctccatctcgcaaactcactgcacttgattcgaacagtgccactaatacactctgctccacactagcatcatgtctagaccgattatgtcctcttgcatccaggccagcccgtgccagtcctcctgcaccctggctctcggatgctctccgtgagcatcgctcaaaacttcgggctgcggagagaaagtggcggaaaactaaaaatcctgcacatctcttaacataccaaactcttctgtcctctttctcagctgaggttacttctgcaaagcagacgtattaccgtctgaaaatcaacaatgccactaatcctcgcctactttttaaaacattttcctccctcctatatcctcctcctccacccgcatcctccacacttactactgatgactttgctacattcttctgcaccaaaactgcaaaaatcagtgctcaatttgctgcacctacaacaaacacgcaagatacaacaccaacaccacacacactcacctctttttctcagctctctgagtctgaggtgtccaaacttgtgctatctagccatgcaaccacctgtccactcgatcccattccctctcatctcttgcaagccatctctcctgcagtcataccaacactgactcacataattaacacatctcttgactctggtttattccccactacatttaagcaggctagggtaaccccactgctaaagaaacccaacctggaccatacgctacttgaaaactacagaccagtatccctgcttccattcatggccaagattctggagaaagtagtgttcaatcaagtcctggactttcttactcaaaacaatctcatggacaacaagcaatccggctttaagaaaggccactcaactgagactgccctgctctcggtcgtggaggatctcagactggctaaagcagactctaaatcatcagtcctcattttgctggacttgtcagctgcttttgacactgtcaaccaccagatcctgctatctacgcttgagtcactgggcgttgcgggcactgttatacaatggtttagatcttacctctctgacaggtcattcagggtgtcttggaggggagaggtgtccaagctacagcatctaaacactggggtacctcaaggctctgttcttgggccacttctcttctccatctacacatcatctctaggaccagtcatccagagacatggattctcctaccactgctatgctgatgacacccagctatacctctcttttcatcctgatgatccctcggttccagctcgtatctcagcctgcctgttggatatttcacactggatgaaagatcatcatcttcagctgaacctcgcaaaaacggaaatgcttgtagtttctgccaacccgactctacaccataacttttcaatccagatggatggggcaaccattactgcatccaaaatggtgaaaagccttggagtaacgattgatgaccaactaaacttctctgaccacatttctagaactgctcgatcgtgcagatttgcactctataacatcagaaagatccgacccttcttatctgaacatgcagctcaactccttgttcaagctcttgttctctccaaactggattactgcaactctctactagctttgcttccagctaactctatcaagcctcttcaactgctccagaatgcagcagcacgagttgtgttcaatgaacctaaacgagcacatgtcactccgctgctagtccgtttgcactggctgccagttgctgctcgcatcaaattcaaaactctgatgtttgcctacaaagtgacttctggcctagcaccttcttatctgcactcacttctgcagatctatgtgccctccagaaacttgcgttctgtgaatgaacgtcgcctcgtggttccatcccaaagagggaaaaaatcactttcgcgaacgctcacgctcaatctgcccagttggtggaatgaactccctaactgcatcagaacagcagagtcactcgctattttcaagaaacgactaaaaactcaactatttagtctccacttcacttcctccggctccgagactcctggaacaagcgagagcgctacacctgagggcagcgaaagcacagtcggccctgcttgccccccaggaagaaccgtgaccaagcggccctgggccctggccgaggacacccctaggggccccgatagcccccccaaaagaccccggcctaacagcctgcctctgaccacaacattcagacctctgcctcctccacctcagaccaccagcgccgtggaccctagcagccactcccctgtgaacccccctcgggaccagcacgccacagataccgccgacgagaagcccagagccgcttctccagccctgagcgacgccagcggacctcctacccctgacatccccctgtctcctggcggcacccacgccagagatcctgatgctgatcctgactctccagacctggacagctccggctccgagactcctggaacaagcgagagcgctacacctgagggaaaaggcgaccccaagaaacctagaggcaagatgagcagctacgcctttttcgtgcagacctgtcgggaagagcacaagaaaaagcaccctgacgccagcgtgaacttctctgagttcagcaagaagtgcagcgagagatggaaaacaatgtccgccaaggaaaagggcaagttcgaggacatggccaaggctgataaggccagatacgagcgggaaatgaaaacctacatcccacctaagggcgagggcggatctggcaaaagaaccgctgatggcagcgagttcgagagccccaagaaaaagagaaaggtgtaagctgcaattgcctctttgaatatcacactaattgtacaaaaaaaaaaaaaaaaaaaaaaaaaactactaacacttcccttcttagactttacagaccgcggcctactcggatccaaaaaaaaaaaaaaaaaaaaaaaaaaaaaaaacgttgactaaaaaaaaaaaaaaaaaaaaaaaaaaaaaaaaaaaaaaaaaaaaaaaaaaaaaaaaaaaaaaaaaaaaaaaaaagcgtcttcgcgcgcatcatcggatgccgggaccgacgagtgcagaggcgtgcaagcgagcttggcgtaatcatggtcatagctgtttcctgtgtgaaattgttatccgctcacaattccacacaacatacgagccggaagcataaagtgtaaagcctggggtgcctaatgagtgagctaactcacattaattgcgttgcgctcactgcccgctttccagtcgggaaacctgtcgtgccagctgcattaatgaatcggccaacgcgcggggagaggcggtttgcgtattgggcgctcttccgcttcctcgctcactgactcgctgcgctcggtcgttcggctgcggcgagcggtatcagctcactcaaaggcggtaatacggttatccacagaatcaggggataacgcaggaaagaacatgtgagcaaaaggccagcaaaaggccaggaaccgtaaaaaggccgcgttgctggcgtttttccataggctccgcccccctgacgagcatcacaaaaatcgacgctcaagtcagaggtggcgaaacccgacaggactataaagataccaggcgtttccccctggaagctccctcgtgcgctctcctgttccgaccctgccgcttaccggatacctgtccgcctttctcccttcgggaagcgtggcgctttctcatagctcacgctgtaggtatctcagttcggtgtaggtcgttcgctccaagctgggctgtgtgcacgaaccccccgttcagcccgaccgctgcgccttatccggtaactatcgtcttgagtccaacccggtaagacacgacttatcgccactggcagcagccactggtaacaggattagcagagcgaggtatgtaggcggtgctacagagttcttgaagtggtggcctaactacggctacactagaagaacagtatttggtatctgcgctctgctgaagccagttaccttcggaaaaagagttggtagctcttgatccggcaaacaaaccaccgctggtagcggtggtttttttgtttgcaagcagcagattacgcgcagaaaaaaaggatctcaagaagatcctttgatcttttctacggggtctgacgctcagtggaacgaaaactcacgttaagggattttggtcatgagattatcaaaaaggatcttcacctagatccttttaaattaaaaatgaagttttaaatcaatctaaagtatatatgagtaaacttggtctgacagttaccaatgcttaatcagtgaggcacctatctcagcgatctgtctatttcgttcatccatagttgcctgactccccgtcgtgtagataactacgatacgggagggcttaccatctggccccagtgctgcaatgataccgcgagacccacgctcaccggctccagatttatcagcaataaaccagccagccggaagggccgagcgcagaagtggtcctgcaactttatccgcctccatccagtctattaattgttgccgggaagctagagtaagtagttcgccagttaatagtttgcgcaacgttgttgccattgctacaggcatcgtggtgtcacgctcgtcgtttggtatggcttcattcagctccggttcccaacgatcaaggcgagttacatgatcccccatgttgtgcaaaaaagcggttagctccttcggtcctccgatcgttgtcagaagtaagttggccgcagtgttatcactcatggttatggcagcactgcataattctcttactgtcatgccatccgtaagatgcttttctgtgactggtgagtactcaaccaagtcattctgagaatagtgtatgcggcgaccgagttgctcttgcccggcgtcaatacgggataataccgcgccacatagcagaactttaaaagtgctcatcattggaaaacgttcttcggggcgaaaactctcaaggatcttaccgctgttgagatccagttcgatgtaacccactcgtgcacccaactgatcttcagcatcttttactttcaccagcgtttctgggtgagcaaaaacaggaaggcaaaatgccgcaaaaaagggaataagggcgacacggaaatgttgaatactcatactcttcctttttcaatattattgaagcatttatcagggttattgtctcatgagcggatacatatttgaatgtatttagaaaaataaacaaataggggttccgcgcacatttccccgaaaagtgccacctgacgtctaagaaaccattattatcatgacattaacctataaaaataggcgtatcacgaggccctttcgtc

SEQ ID NO: 324 - DNA, 7201 bp, synthetic construct
  source 1..7201: mol_type = other DNA
tcgcgcgtttcggtgatgacggtgaaaacctctgacacatgcagctcccggagacggtcacagcttgtctgtaagcggatgccgggagcagacaagcccgtcagggcgcgtcagcgggtgttggcgggtgtcggggctggcttaactatgcggcatcagagcagattgtactgagagtgcaccatatgcggtgtgaaataccgcacagatgcgtaaggagaaaataccgcatcaggcgccattcgccattcaggctgcgcaactgttgggaagggcgatcggtgcgggcctcttcgctattacgccagctggcgaaagggggatgtgctgcaaggcgattaagttgggtaacgccagggttttcccagtcacgacgttgtaaaacgacggccagtgaattggagatcggtacttcgcgaatgcgtcgagattgcagggtcgactaatacgactcactataaggagagatatccctagctagttcaccgcggcagcggtcgcggcagcctcgtgtgaggaccgacgagggtaaagaccatcgactctacctgcgcgactccaccgagcaaagacaccgacaaagcacttgagtactttactttattgttttactttacacttattttttgttgtcagtgcacttttattatgcctaagagaaaggtgtccagcgccgagggcgctgccaaggaagagcctaaacggagaagcgccagactgagcgccaagccccccgccaaggtggaagccaagcctaagaaggccgccgctaaggacaagagcagcgataagaaagtccagaccaagggcaagcggggcgccaaaggcaaacaggccgaggtggccaaccaggagacaaaggaagatctgcctgctgagaacggcgaaaccaagaccgaggaatctccagcttctgacgaggccggagagaaggaggccaaaagcgacagcggctctgagacacctggaacaagcgagagcgccaccccggaatcctgttttctaattcctgttgttactaacactcgcaaaacacgggaggtacgctgcaagcgtaatcctcacaaccttcgttcaatacatgtatctactatttcacaactctctctctccgtgggcctctggaattgtcaatcagctgttaacaaggctgattttattacctccatagctacatattctaagtataatctcatggctctaactgagacctggttgaggccggaggacactgctacacatgctactctttctgctaatttctctttttcccacactcctcgtcagacagggagagggggtgggactggactactaatttccaaagaatggaaatttactctgataccgtccctgccaacaatcagctcctttgaattccatgcagtcaccattatccaccccttctacataaatgtggttgtcatctaccgcccaccaggtaaattaggtcacttcctagatgaactggatgttcttctctcatctttttctaattttgacactcccttattggtgctaggtgacttcaacatttacgttgacaaaccgcaagctgcagactttcagactttgcttgcctcttttgacctaaaaagagcacctacttctgctacccacaaatcaggtaatcagctagaccttatttacacacgacactgcttcactgatcaaacaatagtaactccactacaaatatctgatcatttccttctgtctctcaacatccacattactcctgagccgccacacactcctacactggttacctttcgcagaaacctacgatctctctcacccaatagactatccaccattgtttcagactctcttcctccatctcgcaaactcactgcacttgattcgaacagtgccactaatacactctgctccacactagcatcatgtctagaccgattatgtcctcttgcatccaggccagcccgtgccagtcctcctgcaccctggctctcggatgctctccgtgagcatcgctcaaaacttcgggctgcggagagaaagtggcggaaaactaaaaatcctgcacatctcttaacataccaaactcttctgtcctctttctcagctgaggttacttctgcaaagcagacgtattaccgtctgaaaatcaacaatgccactaatcctcgcctactttttaaaacattttcctccctcctatatcctcctcctccacccgcatcctccacacttactactgatgactttgctacattcttctgcaccaaaactgcaaaaatcagtgctcaatttgctgcacctacaacaaacacgcaagatacaacaccaacaccacacacactcacctctttttctcagctctctgagtctgaggtgtccaaacttgtgctatctagccatgcaaccacctgtccactcgatcccattccctctcatctcttgcaagccatctctcctgcagtcataccaacactgactcacataattaacacatctcttgactctggtttattccccactacatttaagcaggctagggtaaccccactgctaaagaaacccaacctggaccatacgctacttgaaaactacagaccagtatccctgcttccattcatggccaagattctggagaaagtagtgttcaatcaagtcctggactttcttactcaaaacaatctcatggacaacaagcaatccggctttaagaaaggccactcaactgagactgccctgctctcggtcgtggaggatctcagactggctaaagcagactctaaatcatcagtcctcattttgctggacttgtcagctgcttttgacactgtcaaccaccagatcctgctatctacgcttgagtcactgggcgttgcgggcactgttatacaatggtttagatcttacctctctgacaggtcattcagggtgtcttggaggggagaggtgtccaagctacagcatctaaacactggggtacctcaaggctctgttcttgggccacttctcttctccatctacacatcatctctaggaccagtcatccagagacatggattctcctaccactgctatgctgatgacacccagctatacctctcttttcatcctgatgatccctcggttccagctcgtatctcagcctgcctgttggatatttcacactggatgaaagatcatcatcttcagctgaacctcgcaaaaacggaaatgcttgtagtttctgccaacccgactctacaccataacttttcaatccagatggatggggcaaccattactgcatccaaaatggtgaaaagccttggagtaacgattgatgaccaactaaacttctctgaccacatttctagaactgctcgatcgtgcagatttgcactctataacatcagaaagatccgacccttcttatctgaacatgcagctcaactccttgttcaagctcttgttctctccaaactggattactgcaactctctactagctggccttccagctaactctatcaagcctcttcaactgctccagaatgcagcagcacgagttgtgttcaatgaacctaaacgagcacatgtcactccgctgctagtccgtttgcactggctgccagttgctgctcgcatcaaattcaaaactctgatgtttgcctacaaagtgacttctggcctagcaccttcttatctgcactcacttctgcagatctatgtgccctccagaaacttgcgttctgtgaatgaacgtcgcctcgtggttccatcccaaagagggaaaaaatcactttcgcgaacgctcacgctcaatctgcccagttggtggaatgaactccctaactgcatcagaacagcagagtcactcgctattttcaagaaacgactaaaaactcaactatttagtctccacttcacttcctccggctccgagactcctggaacaagcgagagcgctacacctgagggcagcgaaagcacagtcggccctgcttgccccccaggaagaaccgtgaccaagcggccctgggccctggccgaggacacccctaggggccccgatagcccccccaaaagaccccggcctaacagcctgcctctgaccacaacattcagacctctgcctcctccacctcagaccaccagcgccgtggaccctagcagccactcccctgtgaacccccctcgggaccagcacgccacagataccgccgacgagaagcccagagccgcttctccagccctgagcgacgccagcggacctcctacccctgacatccccctgtctcctggcggcacccacgccagagatcctgatgctgatcctgactctccagacctggacagctccggctccgagactcctggaacaagcgagagcgctacacctgagggaaaaggcgaccccaagaaacctagaggcaagatgagcagctacgcctttttcgtgcagacctgtcgggaagagcacaagaaaaagcaccctgacgccagcgtgaacttctctgagttcagcaagaagtgcagcgagagatggaaaacaatgtccgccaaggaaaagggcaagttcgaggacatggccaaggctgataaggccagatacgagcgggaaatgaaaacctacatcccacctaagggcgagggcggatctggcaaaagaaccgctgatggcagcgagttcgagagccccaagaaaaagagaaaggtgtaagctgcaattgcctctttgaatatcacactaattgtacaaaaaaaaaaaaaaaaaaaaaaaaaactactaacacttcccttcttagactttacagaccgcggcctactcggatccaaaaaaaaaaaaaaaaaaaaaaaaaaaaaaaacgttgactaaaaaaaaaaaaaaaaaaaaaaaaaaaaaaaaaaaaaaaaaaaaaaaaaaaaaaaaaaaaaaaaaaaaaaaaaagcgtcttcgcgcgcatcatcggatgccgggaccgacgagtgcagaggcgtgcaagcgagcttggcgtaatcatggtcatagctgtttcctgtgtgaaattgttatccgctcacaattccacacaacatacgagccggaagcataaagtgtaaagcctggggtgcctaatgagtgagctaactcacattaattgcgttgcgctcactgcccgctttccagtcgggaaacctgtcgtgccagctgcattaatgaatcggccaacgcgcggggagaggcggtttgcgtattgggcgctcttccgcttcctcgctcactgactcgctgcgctcggtcgttcggctgcggcgagcggtatcagctcactcaaaggcggtaatacggttatccacagaatcaggggataacgcaggaaagaacatgtgagcaaaaggccagcaaaaggccaggaaccgtaaaaaggccgcgttgctggcgtttttccataggctccgcccccctgacgagcatcacaaaaatcgacgctcaagtcagaggtggcgaaacccgacaggactataaagataccaggcgtttccccctggaagctccctcgtgcgctctcctgttccgaccctgccgcttaccggatacctgtccgcctttctcccttcgggaagcgtggcgctttctcatagctcacgctgtaggtatctcagttcggtgtaggtcgttcgctccaagctgggctgtgtgcacgaaccccccgttcagcccgaccgctgcgccttatccggtaactatcgtcttgagtccaacccggtaagacacgacttatcgccactggcagcagccactggtaacaggattagcagagcgaggtatgtaggcggtgctacagagttcttgaagtggtggcctaactacggctacactagaagaacagtatttggtatctgcgctctgctgaagccagttaccttcggaaaaagagttggtagctcttgatccggcaaacaaaccaccgctggtagcggtggtttttttgtttgcaagcagcagattacgcgcagaaaaaaaggatctcaagaagatcctttgatcttttctacggggtctgacgctcagtggaacgaaaactcacgttaagggattttggtcatgagattatcaaaaaggatcttcacctagatccttttaaattaaaaatgaagttttaaatcaatctaaagtatatatgagtaaacttggtctgacagttaccaatgcttaatcagtgaggcacctatctcagcgatctgtctatttcgttcatccatagttgcctgactccccgtcgtgtagataactacgatacgggagggcttaccatctggccccagtgctgcaatgataccgcgagacccacgctcaccggctccagatttatcagcaataaaccagccagccggaagggccgagcgcagaagtggtcctgcaactttatccgcctccatccagtctattaattgttgccgggaagctagagtaagtagttcgccagttaatagtttgcgcaacgttgttgccattgctacaggcatcgtggtgtcacgctcgtcgtttggtatggcttcattcagctccggttcccaacgatcaaggcgagttacatgatcccccatgttgtgcaaaaaagcggttagctccttcggtcctccgatcgttgtcagaagtaagttggccgcagtgttatcactcatggttatggcagcactgcataattctcttactgtcatgccatccgtaagatgcttttctgtgactggtgagtactcaaccaagtcattctgagaatagtgtatgcggcgaccgagttgctcttgcccggcgtcaatacgggataataccgcgccacatagcagaactttaaaagtgctcatcattggaaaacgttcttcggggcgaaaactctcaaggatcttaccgctgttgagatccagttcgatgtaacccactcgtgcacccaactgatcttcagcatcttttactttcaccagcgtttctgggtgagcaaaaacaggaaggcaaaatgccgcaaaaaagggaataagggcgacacggaaatgttgaatactcatactcttcctttttcaatattattgaagcatttatcagggttattgtctcatgagcggatacatatttgaatgtatttagaaaaataaacaaataggggttccgcgcacatttccccgaaaagtgccacctgacgtctaagaaaccattattatcatgacattaacctataaaaataggcgtatcacgaggccctttcgtc

SEQ ID NO: 325 - DNA, 7201 bp, synthetic construct
  source 1..7201: mol_type = other DNA
tcgcgcgtttcggtgatgacggtgaaaacctctgacacatgcagctcccggagacggtcacagcttgtctgtaagcggatgccgggagcagacaagcccgtcagggcgcgtcagcgggtgttggcgggtgtcggggctggcttaactatgcggcatcagagcagattgtactgagagtgcaccatatgcggtgtgaaataccgcacagatgcgtaaggagaaaataccgcatcaggcgccattcgccattcaggctgcgcaactgttgggaagggcgatcggtgcgggcctcttcgctattacgccagctggcgaaagggggatgtgctgcaaggcgattaagttgggtaacgccagggttttcccagtcacgacgttgtaaaacgacggccagtgaattggagatcggtacttcgcgaatgcgtcgagattgcagggtcgactaatacgactcactataaggagagatatccctagctagttcaccgcggcagcggtcgcggcagcctcgtgtgaggaccgacgagggtaaagaccatcgactctacctgcgcgactccaccgagcaaagacaccgacaaagcacttgagtactttactttattgttttactttacacttattttttgttgtcagtgcacttttattatgcctaagagaaaggtgtccagcgccgagggcgctgccaaggaagagcctaaacggagaagcgccagactgagcgccaagccccccgccaaggtggaagccaagcctaagaaggccgccgctaaggacaagagcagcgataagaaagtccagaccaagggcaagcggggcgccaaaggcaaacaggccgaggtggccaaccaggagacaaaggaagatctgcctgctgagaacggcgaaaccaagaccgaggaatctccagcttctgacgaggccggagagaaggaggccaaaagcgacagcggctctgagacacctggaacaagcgagagcgccaccccggaatcctgttttctaattcctgttgttactaacactcgcaaaacacgggaggtacgctgcaagcgtaatcctcacaaccttcgttcaatacatgtatctactatttcacaactctctctctccgtgggcctctggaattgtcaatcagctgttaacaaggctgattttattacctccatagctacatattctaagtataatctcatggctctaactgagacctggttgaggccggaggacactgctacacatgctactctttctgctaatttctctttttcccacactcctcgtcagacagggagagggggtgggactggactactaatttccaaagaatggaaatttactctgataccgtccctgccaacaatcagctcctttgaattccatgcagtcaccattatccaccccttctacataaatgtggttgtcatctaccgcccaccaggtaaattaggtcacttcctagatgaactggatgttcttctctcatctttttctaattttgacactcccttattggtgctaggtgacttcaacatttacgttgacaaaccgcaagctgcagactttcagactttgcttgcctcttttgacctaaaaagagcacctacttctgctacccacaaatcaggtaatcagctagaccttatttacacacgacactgcttcactgatcaaacaatagtaactccactacaaatatctgatcatttccttctgtctctcaacatccacattactcctgagccgccacacactcctacactggttacctttcgcagaaacctacgatctctctcacccaatagactatccaccattgtttcagactctcttcctccatctcgcaaactcactgcacttgattcgaacagtgccactaatacactctgctccacactagcatcatgtctagaccgattatgtcctcttgcatccaggccagcccgtgccagtcctcctgcaccctggctctcggatgctctccgtgagcatcgctcaaaacttcgggctgcggagagaaagtggcggaaaactaaaaatcctgcacatctcttaacataccaaactcttctgtcctctttctcagctgaggttacttctgcaaagcagacgtattaccgtctgaaaatcaacaatgccactaatcctcgcctactttttaaaacattttcctccctcctatatcctcctcctccacccgcatcctccacacttactactgatgactttgctacattcttctgcaccaaaactgcaaaaatcagtgctcaatttgctgcacctacaacaaacacgcaagatacaacaccaacaccacacacactcacctctttttctcagctctctgagtctgaggtgtccaaacttgtgctatctagccatgcaaccacctgtccactcgatcccattccctctcatctcttgcaagccatctctcctgcagtcataccaacactgactcacataattaacacatctcttgactctggtttattccccactacatttaagcaggctagggtaaccccactgctaaagaaacccaacctggaccatacgctacttgaaaactacagaccagtatccctgcttccattcatggccaagattctggagaaagtagtgttcaatcaagtcctggactttcttactcaaaacaatctcatggacaacaagcaatccggctttaagaaaggccactcaactgagactgccctgctctcggtcgtggaggatctcagactggctaaagcagactctaaatcatcagtcctcattttgctggacttgtcagctgcttttgacactgtcaaccaccagatcctgctatctacgcttgagtcactgggcgttgcgggcactgttatacaatggtttagatcttacctctctgacaggtcattcagggtgtcttggaggggagaggtgtccaagctacagcatctaaacactggggtacctcaaggctctgttcttgggccacttctcttctccatctacacatcatctctaggaccagtcatccagagacatggattctcctaccactgctatgctgatgacacccagctatacctctcttttcatcctgatgatccctcggttccagctcgtatctcagcctgcctgttggatatttcacactggatgaaagatcatcatcttcagctgaacctcgcaaaaacggaaatgcttgtagtttctgccaacccgactctacaccataacttttcaatccagctggatggggcaaccattactgcatccaaaatggtgaaaagccttggagtaacgattgatgaccaactaaacttctctgaccacatttctagaactgctcgatcgtgcagatttgcactctataacatcagaaagatccgacccttcttatctgaacatgcagctcaactccttgttcaagctcttgttctctccaaactggattactgcaactctctactagctttgcttccagctaactctatcaagcctcttcaactgctccagaatgcagcagcacgagttgtgttcaatgaacctaaacgagcacatgtcactccgctgctagtccgtttgcactggctgccagttgctgctcgcatcaaattcaaaactctgatgtttgcctacaaagtgacttctggcctagcaccttcttatctgcactcacttctgcagatctatgtgccctccagaaacttgcgttctgtgaatgaacgtcgcctcgtggttccatcccaaagagggaaaaaatcactttcgcgaacgctcacgctcaatctgcccagttggtggaatgaactccctaactgcatcagaacagcagagtcactcgctattttcaagaaacgactaaaaactcaactatttagtctccacttcacttcctccggctccgagactcctggaacaagcgagagcgctacacctgagggcagcgaaagcacagtcggccctgcttgccccccaggaagaaccgtgaccaagcggccctgggccctggccgaggacacccctaggggccccgatagcccccccaaaagaccccggcctaacagcctgcctctgaccacaacattcagacctctgcctcctccacctcagaccaccagcgccgtggaccctagcagccactcccctgtgaacccccctcgggaccagcacgccacagataccgccgacgagaagcccagagccgcttctccagccctgagcgacgccagcggacctcctacccctgacatccccctgtctcctggcggcacccacgccagagatcctgatgctgatcctgactctccagacctggacagctccggctccgagactcctggaacaagcgagagcgctacacctgagggaaaaggcgaccccaagaaacctagaggcaagatgagcagctacgcctttttcgtgcagacctgtcgggaagagcacaagaaaaagcaccctgacgccagcgtgaacttctctgagttcagcaagaagtgcagcgagagatggaaaacaatgtccgccaaggaaaagggcaagttcgaggacatggccaaggctgataaggccagatacgagcgggaaatgaaaacctacatcccacctaagggcgagggcggatctggcaaaagaaccgctgatggcagcgagttcgagagccccaagaaaaagagaaaggtgtaagctgcaattgcctctttgaatatcacactaattgtacaaaaaaaaaaaaaaaaaaaaaaaaaactactaacacttcccttcttagactttacagaccgcggcctactcggatccaaaaaaaaaaaaaaaaaaaaaaaaaaaaaaaacgttgactaaaaaaaaaaaaaaaaaaaaaaaaaaaaaaaaaaaaaaaaaaaaaaaaaaaaaaaaaaaaaaaaaaaaaaaaaagcgtcttcgcgcgcatcatcggatgccgggaccgacgagtgcagaggcgtgcaagcgagcttggcgtaatcatggtcatagctgtttcctgtgtgaaattgttatccgctcacaattccacacaacatacgagccggaagcataaagtgtaaagcctggggtgcctaatgagtgagctaactcacattaattgcgttgcgctcactgcccgctttccagtcgggaaacctgtcgtgccagctgcattaatgaatcggccaacgcgcggggagaggcggtttgcgtattgggcgctcttccgcttcctcgctcactgactcgctgcgctcggtcgttcggctgcggcgagcggtatcagctcactcaaaggcggtaatacggttatccacagaatcaggggataacgcaggaaagaacatgtgagcaaaaggccagcaaaaggccaggaaccgtaaaaaggccgcgttgctggcgtttttccataggctccgcccccctgacgagcatcacaaaaatcgacgctcaagtcagaggtggcgaaacccgacaggactataaagataccaggcgtttccccctggaagctccctcgtgcgctctcctgttccgaccctgccgcttaccggatacctgtccgcctttctcccttcgggaagcgtggcgctttctcatagctcacgctgtaggtatctcagttcggtgtaggtcgttcgctccaagctgggctgtgtgcacgaaccccccgttcagcccgaccgctgcgccttatccggtaactatcgtcttgagtccaacccggtaagacacgacttatcgccactggcagcagccactggtaacaggattagcagagcgaggtatgtaggcggtgctacagagttcttgaagtggtggcctaactacggctacactagaagaacagtatttggtatctgcgctctgctgaagccagttaccttcggaaaaagagttggtagctcttgatccggcaaacaaaccaccgctggtagcggtggtttttttgtttgcaagcagcagattacgcgcagaaaaaaaggatctcaagaagatcctttgatcttttctacggggtctgacgctcagtggaacgaaaactcacgttaagggattttggtcatgagattatcaaaaaggatcttcacctagatccttttaaattaaaaatgaagttttaaatcaatctaaagtatatatgagtaaacttggtctgacagttaccaatgcttaatcagtgaggcacctatctcagcgatctgtctatttcgttcatccatagttgcctgactccccgtcgtgtagataactacgatacgggagggcttaccatctggccccagtgctgcaatgataccgcgagacccacgctcaccggctccagatttatcagcaataaaccagccagccggaagggccgagcgcagaagtggtcctgcaactttatccgcctccatccagtctattaattgttgccgggaagctagagtaagtagttcgccagttaatagtttgcgcaacgttgttgccattgctacaggcatcgtggtgtcacgctcgtcgtttggtatggcttcattcagctccggttcccaacgatcaaggcgagttacatgatcccccatgttgtgcaaaaaagcggttagctccttcggtcctccgatcgttgtcagaagtaagttggccgcagtgttatcactcatggttatggcagcactgcataattctcttactgtcatgccatccgtaagatgcttttctgtgactggtgagtactcaaccaagtcattctgagaatagtgtatgcggcgaccgagttgctcttgcccggcgtcaatacgggataataccgcgccacatagcagaactttaaaagtgctcatcattggaaaacgttcttcggggcgaaaactctcaaggatcttaccgctgttgagatccagttcgatgtaacccactcgtgcacccaactgatcttcagcatcttttactttcaccagcgtttctgggtgagcaaaaacaggaaggcaaaatgccgcaaaaaagggaataagggcgacacggaaatgttgaatactcatactcttcctttttcaatattattgaagcatttatcagggttattgtctcatgagcggatacatatttgaatgtatttagaaaaataaacaaataggggttccgcgcacatttccccgaaaagtgccacctgacgtctaagaaaccattattatcatgacattaacctataaaaataggcgtatcacgaggccctttcgtc

SEQ ID NO: 326 - DNA, 5933 bp, synthetic construct
  source 1..5933: mol_type = other DNA
tcgcgcgtttcggtgatgacggtgaaaacctctgacacatgcagctcccggagacggtcacagcttgtctgtaagcggatgccgggagcagacaagcccgtcagggcgcgtcagcgggtgttggcgggtgtcggggctggcttaactatgcggcatcagagcagattgtactgagagtgcaccatatgcggtgtgaaataccgcacagatgcgtaaggagaaaataccgcatcaggcgccattcgccattcaggctgcgcaactgttgggaagggcgatcggtgcgggcctcttcgctattacgccagctggcgaaagggggatgtgctgcaaggcgattaagttgggtaacgccagggttttcccagtcacgacgttgtaaaacgacggccagtgaattggagatcggtacttcgcgagtttaaactaatacgactcactataagggggggacacggaaagagcctccccgaagattgagtgaattcagtcgggcgtcccctgggcaacgtttcttgtaagcggccgatctttccaccccaaaagcattggatgaatggatgaataccaaaggtctttatcaagaccattgctaacgattatgtctattaatatagaaggtttgtcacttgctaaggaagaactattagccaaaatgtctgaggacatctcgtgtgacatcctatgtatacaggaaacacacagagacatcacaatgaggagaccaaaaattcttggaatgcaactggcagtggaacgacctcacagacaatatggcagtgccatttttgtacgatctggtgtagcaatctctgcaacttccctcacagaagtgaacaacattgaaatcttatctgtggaacttgatagttgcaccgtatcatcactctataaaccacctggggctgatttctattttacacccccaaccagttgccacaatcatgaagcccattttgttgtgggagatttcaatagccacagctgtgtctggggctatgacgaagatgatagaaatggcgaagcagttctaacgtgggccgacaatagtagaatgagcctccttcatgacagtaaattaccaccatcatttaatagcggccgatggaagcgtggttataaccctgatctgatttttgtaaaggaaagcataagccaccaatgcaccaaaagggtattaaacccaatacctaacacacaacacagaccaatatgctgcgtagcatatgcagctgtaagaccgaaaagtgtcccattccgcagaagatttaacttcaataaagctaactggacaaagtttacagagaccttggaagctgctatttctgatatagaaccttctatagaaaattatgacctgttcgtagaagctgtgaaaagatcctcaaggctctcaatccctagaggctgtcgcacaagctacctaccaggcctaaacgaagaatcactaaatcagctacaagaatatctcagattatttcaagagaacccatacagtgatgggactatagcagcaggccaaaaactatctacagccttagctaatgctaagaaagaccgttggatagagctgcttgagaacctggacatgtccaagagtagccgaaaagcctggcaattgctgagacgcctggatagtgaccctctggtcaaccctggacacgcgaacgtgacaccagatcagatagctcaccagctaattcagaatgggaaaaccaactgcagcagaataaagatgaaaatcaacagggtgccagaacttgaaacccaccagttgtcctctcctctaaacctgaaagaactcagagaagccatcaagcgatgtaagactggtaaagcacctggcctagatgacctgatgatggagcaaatcaaacacttggggcccaaagctgaaaactggcttttgaaattctacaatcaatgcctggcacacaaacagattcccagagcatggaggaaaactaagataattgccatcttaaaacctggtaaagatgcctccaatgccaggaactatcgaccaatctccctcttatgtcatctatataaagtctatgagaggatgctattaaatcgactaggacctgttatcgaacccaagcttattgcacaacaagcaggtttcagaccagggaaaaactgtacaggtcaaattcttcatctgactgaacatatcgaggaaggctatgagaaaggctgcattacgggaacagtctttgtggaccttacggcagcctatgacacggtgcaacatagaaaaatgctgcataaagtctaccatatcacccgggactttgactttacaaaaactgtccagaccctcttagaaaaccgcagcttctatgtggagtttcagggccagaaaagcagatggaggaggcaaaagaatggtttaccccaaggcagcgttcttgcaccaaccttatttaacatcttcacgaacgatcagccacaaccaccactcacaaagagctttatatatgctgatgaccttggccttacaacacaagcaaaagattttgaaacagttgaaaagcaactcaccaatgccttgaaagatctctccagctactacaaagagaaccacctgaagcctaaccctgccaagacacaagtgtgtgctttccacctacgtaaccgcgaagccaacaggaaactgaaagttacttgggaaggccaagagctcgaacactgtttccatcctaaataccttggtgtcaccttagaccgaacactaacatataggaaacactgcatgaacaccaagcacaaagtagctgcacgcaataacatcctgcggaaactgactggcagcgcatggggagcagacccacaagtaataagaacatcagccctggccttgtctttctcaactgcagagtatgcctgtcctgtttggcacaagtctgcccatgcaaagcaggtggacatagcactgaatgaaacatgcagaatcatcacgggatgccttaaacctacacctgttgataaactctacaagttagctggcattgcccctcctgacgtgcgacgggaagttgctgctaacggtgagagaaaaaaggtcgaacattgtgaaagccacccactgcatggctatcaccctcctcccaccagactcaaatcaaggaagggcttcatgagaaccaccactcctcttgatgttcctccagcagcagcaagggtgtccctctgggcagctaaacctggcaattctaactggatggccccccaagagggacttcctccaggggcaaaccaagaatgggcaacttggaagtccctgaacagactcagaagtggagtgggcagatcaaaagacaacttggcaaggtggcactacctggaggaatcctccaccttgtgtgactgtggagctgaacaaacaactcagcatatgtatgcttgcccacaatgccctgcctcatgtacggaggaggagttgtttaaagctacagacaatgcggttgctgttgcccgcttttggtccaaaactatttaggtcgacgctagcaccggtaaaaaaaaaaaaaaaaaaaaaaaaaaaaaaaacgttgactaaaaaaaaaaaaaaaaaaaaaaaaaaaaaaaaaaaaaaaaaaaaaaaaaaaaaaaaaaaaaaaaaaaaaaaaaaaagtcttcgcgcgcatcatcggatgccgggaccgacgagtgcagaggcgtgcaagcgagcttggcgtaatcatggtcatagctgtttcctgtgtgaaattgttatccgctcacaattccacacaacatacgagccggaagcataaagtgtaaagcctggggtgcctaatgagtgagctaactcacattaattgcgttgcgctcactgcccgctttccagtcgggaaacctgtcgtgccagctgcattaatgaatcggccaacgcgcggggagaggcggtttgcgtattgggcgctcttccgcttcctcgctcactgactcgctgcgctcggtcgttcggctgcggcgagcggtatcagctcactcaaaggcggtaatacggttatccacagaatcaggggataacgcaggaaagaacatgtgagcaaaaggccagcaaaaggccaggaaccgtaaaaaggccgcgttgctggcgtttttccataggctccgcccccctgacgagcatcacaaaaatcgacgctcaagtcagaggtggcgaaacccgacaggactataaagataccaggcgtttccccctggaagctccctcgtgcgctctcctgttccgaccctgccgcttaccggatacctgtccgcctttctcccttcgggaagcgtggcgctttctcatagctcacgctgtaggtatctcagttcggtgtaggtcgttcgctccaagctgggctgtgtgcacgaaccccccgttcagcccgaccgctgcgccttatccggtaactatcgtcttgagtccaacccggtaagacacgacttatcgccactggcagcagccactggtaacaggattagcagagcgaggtatgtaggcggtgctacagagttcttgaagtggtggcctaactacggctacactagaagaacagtatttggtatctgcgctctgctgaagccagttaccttcggaaaaagagttggtagctcttgatccggcaaacaaaccaccgctggtagcggtggtttttttgtttgcaagcagcagattacgcgcagaaaaaaaggatctcaagaagatcctttgatcttttctacggggtctgacgctcagtggaacgaaaactcacgttaagggattttggtcatgagattatcaaaaaggatcttcacctagatccttttaaattaaaaatgaagttttaaatcaatctaaagtatatatgagtaaacttggtctgacagttaccaatgcttaatcagtgaggcacctatctcagcgatctgtctatttcgttcatccatagttgcctgactccccgtcgtgtagataactacgatacgggagggcttaccatctggccccagtgctgcaatgataccgcgggacccacgctcaccggctccagatttatcagcaataaaccagccagccggaagggccgagcgcagaagtggtcctgcaactttatccgcctccatccagtctattaattgttgccgggaagctagagtaagtagttcgccagttaatagtttgcgcaacgttgttgccattgctacaggcatcgtggtgtcacgctcgtcgtttggtatggcttcattcagctccggttcccaacgatcaaggcgagttacatgatcccccatgttgtgcaaaaaagcggttagctccttcggtcctccgatcgttgtcagaagtaagttggccgcagtgttatcactcatggttatggcagcactgcataattctcttactgtcatgccatccgtaagatgcttttctgtgactggtgagtactcaaccaagtcattctgagaatagtgtatgcggcgaccgagttgctcttgcccggcgtcaatacgggataataccgcgccacatagcagaactttaaaagtgctcatcattggaaaacgttcttcggggcgaaaactctcaaggatcttaccgctgttgagatccagttcgatgtaacccactcgtgcacccaactgatcttcagcatcttttactttcaccagcgtttctgggtgagcaaaaacaggaaggcaaaatgccgcaaaaaagggaataagggcgacacggaaatgttgaatactcatactcttcctttttcaatattattgaagcatttatcagggttattgtctcatgagcggatacatatttgaatgtatttagaaaaataaacaaataggggttccgcgcacatttccccgaaaagtgccacctgacgtctaagaaaccattattatcatgacattaacctataaaaataggcgtatcacgaggccctttcgtc

SEQ ID NO: 327 - protein, 982 aa, synthetic construct
MDEYQRSLSRPLLTIMSINIEGLSLAKEELLAKMSEDISCDILCIQETHRDITMRRPKILGMQLAVERPHRQYGSAIFVRSGVAISATSLTEVNNIEILSVELDSCTVSSLYKPPGADFYFTPPTSCHNHEAHFVVGDFNSHSCVWGYDEDDRNGEAVLTWADNSRMSLLHDSKLPPSFNSGRWKRGYNPDLIFVKESISHQCTKRVLNPIPNTQHRPICCVAYAAVRPKSVPFRRRFNFNKANWTKFTETLEAAISDIEPSIENYDLFVEAVKRSSRLSIPRGCRTSYLPGLNEESLNQLQEYLRLFQENPYSDGTIAAGQKLSTALANAKKDRWIELLENLDMSKSSRKAWQLLRRLDSDPLVNPGHANVTPDQIAHQLIQNGKTNCSRIKMKINRVPELETHQLSSPLNLKELREAIKRCKTGKAPGLDDLMMEQIKHLGPKAENWLLKFYNQCLAHKQIPRAWRKTKIIAILKPGKDASNARNYRPISLLCHLYKVYERMLLNRLGPVIEPKLIAQQAGFRPGKNCTGQILHLTEHIEEGYEKGCITGTVFVDLTAAYDTVQHRKMLHKVYHITRDFDFTKTVQTLLENRSFYVEFQGQKSRWRRQKNGLPQGSVLAPTLFNIFTNDQPQPPLTKSFIYADDLGLTTQAKDFETVEKQLTNALKDLSSYYKENHLKPNPAKTQVCAFHLRNREANRKLKVTWEGQELEHCFHPKYLGVTLDRTLTYRKHCMNTKHKVAARNNILRKLTGSAWGADPQVIRTSALALSFSTAEYACPVWHKSAHAKQVDIALNETCRIITGCLKPTPVDKLYKLAGIAPPDVRREVAANGERKKVEHCESHPLHGYHPPPTRLKSRKGFMRTTTPLDVPPAAARVSLWAAKPGNSNWMAPQEGLPPGANQEWATWKSLNRLRSGVGRSKDNLARWHYLEESSTLCDCGAEQTTQHMYACPQCPASCTEEELFKATDNAVAVARFWSKTI

SEQ ID NO: 328 - DNA, 4589 bp, synthetic construct
  source 1..4589: mol_type = other DNA
tcgcgcgtttcggtgatgacggtgaaaacctctgacacatgcagctcccggagacggtcacagcttgtctgtaagcggatgccgggagcagacaagcccgtcagggcgcgtcagcgggtgttggcgggtgtcggggctggcttaactatgcggcatcagagcagattgtactgagagtgcaccatatgcggtgtgaaataccgcacagatgcgtaaggagaaaataccgcatcaggcgccattcgccattcaggctgcgcaactgttgggaagggcgatcggtgcgggcctcttcgctattacgccagctggcgaaagggggatgtgctgcaaggcgattaagttgggtaacgccagggttttcccagtcacgacgttgtaaaacgacggccagtgaattggagatcggtacttcgcgagtttaaactaatacgactcactataagggggggacacggaaagagcctccccgaagattgagtgaattcagtcgggcgtcccctgggcaacgtttcttgtaagcggccgatctttccaccccaaaagcattggatgagtcgacgcggcctactcgacggatcgatccgaacaaacgacccaacacccgtgcgttttattctgtctttttattgccgatcccctcagaagaactcgtcaagaaggcgatagaaggcgatgcgctgcgaatcgggagcggcgataccgtaaagcacgaggaagcggtcagcccattcgccgccaagctcttcagcaatatcacgggtagccaacgctatgtcctgatagcggtcggccgctttacttgtacagctcgtccatgccgagagtgatcccggcggcggtcacgaactccagcaggaccatgtgatcgcgcttctcgttggggtctttgctcagggcggactgggtgctcaggtagtggttgtcgggcagcagcacggggccgtcgccgatgggggtgttctgctggtagtggtcggccagctgcacgctgccgtcctcgatgttgtggcggatcttgaagttcaccttgatgccgttcttctgcttgtcggccatgatatagacgttgtggctgttgtagttgtactccagcttgtgccccaggatgttgccgtcctccttgaagtcgatgcccttcagctcgatgcggttcaccagggtgtcgccctcgaacttcacctcggcgcgggtcttgtagttgccgtcgtccttgaagaagatggtgcgctcctggacgtagccttcgggcatggcggacttgaagaagtcgtgctgcttcatgtggtcggggtagcggctgaagcactgcacgccgtaggtcagggtggtcacgagggtgggccagggcacgggcagcttgccggtggtgcagatgaacttcagggtcagcttgccgtaggtggcatcgccctcgccctcgccggacacgctgaacttgtggccgtttacgtcgccgtccagctcgaccaggatgggcaccaccccggtgaacagctcctcgcccttgctcaccatggtggctcgagaactagatcgcgccgagtgagggttgtgggctcttttattgagctcggggagcagaagcgcgcgaacagaagcgagaagcgaactgattggttagttcaaataaggcacagggtcatttcaggtccttggggcaccctggaaacatctgatggttctctagaaactgctgagggcgggaccgcatctggggaccatctgttcttggccctgagccggggcaggaactgcttaccacagatatcctgtttggcccatattctgctgttccaactgttcttggccctgagccggggcaggaactgcttaccacagatatcctgtttggcccatattctgctgtctctctgttcctaaccttgatcctagcttgccaaacctacaggtggggtctttcattcccccctttttctggagactaaataaaatcttttattctatctatggctcgtactctataggcttcagctggtgatattgttgagtcaaaactagagcctggaccactgatatcctgtctttaacaaattggactaatcgaattcgaagcttttgcttgtgatttcttttcttttttattttatttccattatttgaaatgtatttgctgtaccaatgcttttgacacgaaataaataaagctagcaccggtaaaaaaaaaaaaaaaaaaaaaaaaaaaaaaaacgttgactaaaaaaaaaaaaaaaaaaaaaaaaaaaaaaaaaaaaaaaaaaaaaaaaaaaaaaaaaaaaaaaaaaaaaaaaaaaagtcttcgcgcgcatcatcggatgccgggaccgacgagtgcagaggcgtgcaagcgagcttggcgtaatcatggtcatagctgtttcctgtgtgaaattgttatccgctcacaattccacacaacatacgagccggaagcataaagtgtaaagcctggggtgcctaatgagtgagctaactcacattaattgcgttgcgctcactgcccgctttccagtcgggaaacctgtcgtgccagctgcattaatgaatcggccaacgcgcggggagaggcggtttgcgtattgggcgctcttccgcttcctcgctcactgactcgctgcgctcggtcgttcggctgcggcgagcggtatcagctcactcaaaggcggtaatacggttatccacagaatcaggggataacgcaggaaagaacatgtgagcaaaaggccagcaaaaggccaggaaccgtaaaaaggccgcgttgctggcgtttttccataggctccgcccccctgacgagcatcacaaaaatcgacgctcaagtcagaggtggcgaaacccgacaggactataaagataccaggcgtttccccctggaagctccctcgtgcgctctcctgttccgaccctgccgcttaccggatacctgtccgcctttctcccttcgggaagcgtggcgctttctcatagctcacgctgtaggtatctcagttcggtgtaggtcgttcgctccaagctgggctgtgtgcacgaaccccccgttcagcccgaccgctgcgccttatccggtaactatcgtcttgagtccaacccggtaagacacgacttatcgccactggcagcagccactggtaacaggattagcagagcgaggtatgtaggcggtgctacagagttcttgaagtggtggcctaactacggctacactagaagaacagtatttggtatctgcgctctgctgaagccagttaccttcggaaaaagagttggtagctcttgatccggcaaacaaaccaccgctggtagcggtggtttttttgtttgcaagcagcagattacgcgcagaaaaaaaggatctcaagaagatcctttgatcttttctacggggtctgacgctcagtggaacgaaaactcacgttaagggattttggtcatgagattatcaaaaaggatcttcacctagatccttttaaattaaaaatgaagttttaaatcaatctaaagtatatatgagtaaacttggtctgacagttaccaatgcttaatcagtgaggcacctatctcagcgatctgtctatttcgttcatccatagttgcctgactccccgtcgtgtagataactacgatacgggagggcttaccatctggccccagtgctgcaatgataccgcgggacccacgctcaccggctccagatttatcagcaataaaccagccagccggaagggccgagcgcagaagtggtcctgcaactttatccgcctccatccagtctattaattgttgccgggaagctagagtaagtagttcgccagttaatagtttgcgcaacgttgttgccattgctacaggcatcgtggtgtcacgctcgtcgtttggtatggcttcattcagctccggttcccaacgatcaaggcgagttacatgatcccccatgttgtgcaaaaaagcggttagctccttcggtcctccgatcgttgtcagaagtaagttggccgcagtgttatcactcatggttatggcagcactgcataattctcttactgtcatgccatccgtaagatgcttttctgtgactggtgagtactcaaccaagtcattctgagaatagtgtatgcggcgaccgagttgctcttgcccggcgtcaatacgggataataccgcgccacatagcagaactttaaaagtgctcatcattggaaaacgttcttcggggcgaaaactctcaaggatcttaccgctgttgagatccagttcgatgtaacccactcgtgcacccaactgatcttcagcatcttttactttcaccagcgtttctgggtgagcaaaaacaggaaggcaaaatgccgcaaaaaagggaataagggcgacacggaaatgttgaatactcatactcttcctttttcaatattattgaagcatttatcagggttattgtctcatgagcggatacatatttgaatgtatttagaaaaataaacaaataggggttccgcgcacatttccccgaaaagtgccacctgacgtctaagaaaccattattatcatgacattaacctataaaaataggcgtatcacgaggccctttcgtc

SEQ ID NO: 329 - protein, 227 aa, Tequatrovirus T4
KLSKDTTALLKNFATINSGIMLKSGQFIMTRAVNGTTYAEANISDVIDFDVAIYDLNGFLGILSLVNDDAEISQSEDGNIKIADARSTIFWPAADPSTVVAPNKPIPFPVASAVTEIKAEDLQQLLRVSRGLQIDTIAITVKEGKIVINGFNKVEDSALTRVKYSLTLGDYDGENTFNFIINMANMKMQPGNYKLLLWAKGKQGAAKFEGEHANYVVALEADSTHDF

SEQ ID NO: 330 - protein, 1368 aa, synthetic construct
MDKKYSIGLAIGTNSVGWAVITDEYKVPSKKFKVLGNTDRHSIKKNLIGALLFDSGETAEATRLKRTARRRYTRRKNRICYLQEIFSNEMAKVDDSFFHRLEESFLVEEDKKHERHPIFGNIVDEVAYHEKYPTIYHLRKKLVDSTDKADLRLIYLALAHMIKFRGHFLIEGDLNPDNSDVDKLFIQLVQTYNQLFEENPINASGVDAKAILSARLSKSRRLENLIAQLPGEKKNGLFGNLIALSLGLTPNFKSNFDLAEDAKLQLSKDTYDDDLDNLLAQIGDQYADLFLAAKNLSDAILLSDILRVNTEITKAPLSASMIKRYDEHHQDLTLLKALVRQQLPEKYKEIFFDQSKNGYAGYIDGGASQEEFYKFIKPILEKMDGTEELLVKLNREDLLRKQRTFDNGSIPHQIHLGELHAILRRQEDFYPFLKDNREKIEKILTFRIPYYVGPLARGNSRFAWMTRKSEETITPWNFEEVVDKGASAQSFIERMTNFDKNLPNEKVLPKHSLLYEYFTVYNELTKVKYVTEGMRKPAFLSGEQKKAIVDLLFKTNRKVTVKQLKEDYFKKIECFDSVEISGVEDRFNASLGTYHDLLKIIKDKDFLDNEENEDILEDIVLTLTLFEDREMIEERLKTYAHLFDDKVMKQLKRRRYTGWGRLSRKLINGIRDKQSGKTILDFLKSDGFANRNFMQLIHDDSLTFKEDIQKAQVSGQGDSLHEHIANLAGSPAIKKGILQTVKVVDELVKVMGRHKPENIVIEMARENQTTQKGQKNSRERMKRIEEGIKELGSQILKEHPVENTQLQNEKLYLYYLQNGRDMYVDQELDINRLSDYDVDAIVPQSFLKDDSIDNKVLTRSDKNRGKSDNVPSEEVVKKMKNYWRQLLNAKLITQRKFDNLTKAERGGLSELDKAGFIKRQLVETRQITKHVAQILDSRMNTKYDENDKLIREVKVITLKSKLVSDFRKDFQFYKVREINNYHHAHDAYLNAVVGTALIKKYPKLESEFVYGDYKVYDVRKMIAKSEQEIGKATAKYFFYSNIMNFFKTEITLANGEIRKRPLIETNGETGEIVWDKGRDFATVRKVLSMPQVNIVKKTEVQTGGFSKESILPKRNSDKLIARKKDWDPKKYGGFDSPTVAYSVLVVAKVEKGKSKKLKSVKELLGITIMERSSFEKNPIDFLEAKGYKEVKKDLIIKLPKYSLFELENGRKRMLASAGELQKGNELALPSKYVNFLYLASHYEKLKGSPEDNEQKQLFVEQHKHYLDEIIEQISEFSKRVILADANLDKVLSAYNKHRDKPIREQAENIIHLFTLTNLGAPAAFKYFDTTIDRKRYTSTKEVLDATLIHQSITGLYETRIDLSQLGGD

SEQ ID NO: 331 - protein, 353 aa, synthetic construct
NTKYNKEFLLYLAGFVDGDGSIFARIKPSQRSKFKHKLHLVFAVYQKTQRRWFLDKLVDEIGVGYVLDSGSVSFYSLSEIKPLHNFLTQLQPFLKLKQKQANLVLKIIEQLPSAKESPDKFLEVCTWVDQIAALNDSKTRKTTSETVRAVLDSLPGSVGGLSPSQASSAASSASSSPGSGISEALRAGAGSGTGYNKEFLLYLAGFVDGDGSIYARIKPVQRAKFKHELVLGFDVTQKTQRRWFLDKLVDEIGVGYVYDKGSVSAYRLSQIKPLHNFLTQLQPFLKLKQKQANLVLKIIEQLPSAKESPDKFLEVCTWVDQIAALNDSKTRKTTSETVRAVLDSLSEKKKSSP

SEQ ID NO: 332 - protein, 353 aa, synthetic construct
NTKYNKEFLLYLAGFVDGDGSIFARIKPSQRSKFKHKLHLVFAVYEKTQRRWFLDKLVDEIGVGYVLDSGSVSFYSLSEIKPLHNFLTQLQPFLKLKQKQANLVLKIIEQLPSAKESPDKFLEVCTWVDQIAALNDSKTRKTTSETVRAVLDSLPGSVGGLSPSQASSAASSASSSPGSGISEALRAGAGSGTGYNKEFLLYLAGFVDGDGSIYARIKPVQRAKFKHELVLGFDVTQKTQRRWFLDKLVDEIGVGYVYDKGSVSAYRLSQIKPLHNFLTQLQPFLKLKQKQANLVLKIIEQLPSAKESPDKFLEVCTWVDQIAALNDSKTRKTTSETVRAVLDSLSEKKKSSP

SEQ ID NO: 333 - protein, 1368 aa, synthetic construct
MDKKYSIGLDIGTNSVGWAVITDEYKVPSKKFKVLGNTDRHSIKKNLIGALLFDSGETAEATRLKRTARRRYTRRKNRICYLQEIFSNEMAKVDDSFFHRLEESFLVEEDKKHERHPIFGNIVDEVAYHEKYPTIYHLRKKLVDSTDKADLRLIYLALAHMIKFRGHFLIEGDLNPDNSDVDKLFIQLVQTYNQLFEENPINASGVDAKAILSARLSKSRRLENLIAQLPGEKKNGLFGNLIALSLGLTPNFKSNFDLAEDAKLQLSKDTYDDDLDNLLAQIGDQYADLFLAAKNLSDAILLSDILRVNTEITKAPLSASMIKRYDEHHQDLTLLKALVRQQLPEKYKEIFFDQSKNGYAGYIDGGASQEEFYKFIKPILEKMDGTEELLVKLNREDLLRKQRTFDNGSIPHQIHLGELHAILRRQEDFYPFLKDNREKIEKILTFRIPYYVGPLARGNSRFAWMTRKSEETITPWNFEEVVDKGASAQSFIERMTNFDKNLPNEKVLPKHSLLYEYFTVYNELTKVKYVTEGMRKPAFLSGEQKKAIVDLLFKTNRKVTVKQLKEDYFKKIECFDSVEISGVEDRFNASLGTYHDLLKIIKDKDFLDNEENEDILEDIVLTLTLFEDREMIEERLKTYAHLFDDKVMKQLKRRRYTGWGRLSRKLINGIRDKQSGKTILDFLKSDGFANRNFMQLIHDDSLTFKEDIQKAQVSGQGDSLHEHIANLAGSPAIKKGILQTVKVVDELVKVMGRHKPENIVIEMARENQTTQKGQKNSRERMKRIEEGIKELGSQILKEHPVENTQLQNEKLYLYYLQNGRDMYVDQELDINRLSDYDVDAIVPQSFLKDDSIDNKVLTRSDKNRGKSDNVPSEEVVKKMKNYWRQLLNAKLITQRKFDNLTKAERGGLSELDKAGFIKRQLVETRQITKHVAQILDSRMNTKYDENDKLIREVKVITLKSKLVSDFRKDFQFYKVREINNYHHAHDAYLNAVVGTALIKKYPKLESEFVYGDYKVYDVRKMIAKSEQEIGKATAKYFFYSNIMNFFKTEITLANGEIRKRPLIETNGETGEIVWDKGRDFATVRKVLSMPQVNIVKKTEVQTGGFSKESILPKRNSDKLIARKKDWDPKKYGGFDSPTVAYSVLVVAKVEKGKSKKLKSVKELLGITIMERSSFEKNPIDFLEAKGYKEVKKDLIIKLPKYSLFELENGRKRMLASAGELQKGNELALPSKYVNFLYLASHYEKLKGSPEDNEQKQLFVEQHKHYLDEIIEQISEFSKRVILADANLDKVLSAYNKHRDKPIREQAENIIHLFTLTNLGAPAAFKYFDTTIDRKRYTSTKEVLDATLIHQSITGLYETRIDLSQLGGD

SEQ ID NO: 334 - protein, 17 aa, synthetic construct
SGSETPGTSESATPEGS

SEQ ID NO: 335 - skipped

SEQ ID NO: 336 - protein, 4 aa, synthetic construct
GGSG

SEQ ID NO: 337 - protein, 4 aa, synthetic construct
GSGS

SEQ ID NO: 338 - protein, 4 aa, synthetic construct
GGGS

SEQ ID NO: 339 - protein, 6 aa, synthetic construct
GGSGGG

SEQ ID NO: 340 - protein, 8 aa, synthetic construct
GSGSGSGS

SEQ ID NO: 341 - protein, 965 aa, synthetic construct
MCFLIPVVTNTRKTREVRCKRNPHNLRSIHVSTISQLSLSVGLWNCQSAVNKADFITSIATYSDYNLMALTETWLRPEDTATHATLSANFSFSHTPRQTGRGGGTGLLISKEWKFTLIPSLPTISSFEFHAVTIIHPFYINVVVIYRPPGKLGHFLDELDVLLSSFSNFDTPLLVLGDFNIYVDKPQAADFQTLLASFDLKRAPTSATHKSGNQLDLIYTRHCFTDQTIVTPLQISDHFLLSLNIHITPEPPHTPTLVTFRRNLRSLSPNRLSTIVSDSLPPSRKLTALDSNSATNTLCSTLASCLDRLCPLASRPARASPPAPWLSDALREHRSKLRAAERKWRKTKNPAHLLTYQTLLSSFSAEVTSAKQTYYRLKINNATNPRLLFKTFSSLLYPPPPPASSTLTTDDFATFFCTKTAKISAQFAAPTTNTQDTTPTPHTLTSFSQLSESEVSKLVLSSHATTCPLDPIPSHLLQAISPAVIPTLTHIINTSLDSGLFPTTFKQARVTPLLKKPNLDHTLLENYRPVSLLPFMAKILEKVVFNQVLDFLTQNNLMDNKQSGFKKGHSTETALLSVVEDLRLAKADSKSSVLILLDLSAAFDTVNHQILLSTLESLGVAGTVIQWFRSYLSDRSFRVSWRGEVSNLQHLNTGVPQGSVLGPLLFSIYTSSLGPVIQRHGFSYHCYADDTQLYLSFHPDDPSVPARISACLLDISHWMKDHHLQLNLAKTEMLVVSANPTLHHNFSIQMDGATITASKMVKSLGVTIDDQLNFSDHISRTARSCRFALYNIRKIRPFLSEHAAQLLVQALVLSKLDYCNSLLALLPANSIKPLQLLQNAAARVVFNEPKRAHVTPLLVRLHWLPVAARIKFKTLMFAYKVTSGLAPSYLHSLLQIYVPSRNLRSVNERRLVVPSQRGKKSLSRTLTLNLPSWWNELPNCIRTAESLAIFKKRLKTQLFSLHFTS

SEQ ID NO: 342 - protein, 965 aa, synthetic construct
MCFLIPVVTNTRKTREVRCKRNPHNLRSIHVSTISQLSLSVGLWNCQSAVNKADFITSIATYSDYNLMALTETWLRPEDTATHATLSANFSFSHTPRQTGRGGGTGLLISKEWKFTLIPSLPTISSFEFHAVTIIHPFYINVVVIYRPPGKLGHFLDELDVLLSSFSNFDTPLLVLGDFNIYVDKPQAADFQTLLASFDLKRAPTSATHKSGNQLDLIYTRHCFTDQTIVTPLQISDHFLLSLNIHITPEPPHTPTLVTFRRNLRSLSPNRLSTIVSDSLPPSRKLTALDSNSATNTLCSTLASCLDRLCPLASRPARASPPAPWLSDALREHRSKLRAAERIWRKTKNPAHLLTYQTLLSSFSAEVTSAKKTYYRLKINNATNPRLLFKTFSSLLYPPPPPASSTLTTDDFATFFCTKTAKISAQFAAPTTNTQDTTPTPHTLTSFSQLSESEVSKLVLSSHATTCPLDPIPSHLLQAISPAVIPTLTHIINTSLDSGLFPTTFKQARVTPLLKKPNLDHTLLENYRPVSLLPFMAKILEKVVFNQVLDFLTQNNLMDNKQSGFKKGHSTETALLSVVEDLRLAKADSKSSVLILLDLSAAFDTVNHQILLSTLESLGVAGTVIQWFRSYLSDRSFRVSWRGEVSNLQHLNTGVPQGSVLGPLLFSIYTSSLGPVIQRHGFSYHCYADDTQLYLSFHPDDPSVPARISACLLDISHWMKDHHLQLNLAKTEMLVVSANPTLHHNFSIQMDGATITASKMVKSLGVTIDDQLNFSDHISRTARSCRFALYNIRKIRPFLSEHAAQLLVQALVLSKLDYCNSLLALLPANSIKPLQLLQNAAARVVFNEPKRAHVTPLLVRLHWLPVAARIKFKTLMFAYKVTSGLAPSYLHSLLQIYVPSRNLRSVNERRLVVPSQRGKKSLSRTLTLNLPSWWNELPNCIRTAESLAIFKKRLKTQLFSLHFTS

SEQ ID NO: 343 - protein, 965 aa, synthetic construct
MCFLIPVVTNTRKTREVRCKRNPHNLRSIHVSTISQLSLSVGLWNCQSAVNKADFITSIATYSDYNLMALTETWLRPEDTATHATLSANFSFSHTPRQTGRGGGTGLLISKEWKFTLIPSLPTISSFEFHAVTIIHPFYINVVVIYRPPGKLGHFLDELDVLLSSFSNFDTPLLVLGDFNIYVDKPQAADFQTLLASFDLKRAPTSATHKSGNQLDLIYTRHCFTDQTIVTPLQISDHFLLSLNIHITPEPPHTPTLVTFRRNLRSLSPNRLSTIVSDSLPPSRKLTALDSNSATNTLCSTLASCLDRLCPLASRPARASPPAPWLSDALREHRSKLRAAERIWRKTKNPAHLLTYQTLLSSFSANVTSAKQTYYRLKINNATNPRLLFKTFSSLLYPPPPPASSTLTTDDFATFFCTKTAKISAQFAAPTTNTQDTTPTPHTLTSFSQLSESEVSKLVLSSHATTCPLDPIPSHLLQAISPAVIPTLTHIINTSLDSGLFPTTFKQARVTPLLKKPNLDHTLLENYRPVSLLPFMAKILEKVVFNQVLDFLTQNNLMDNKQSGFKKGHSTETALLSVVEDLRLAKADSKSSVLILLDLSAAFDTVNHQILLSTLESLGVAGTVIQWFRSYLSDRSFRVSWRGEVSNLQHLNTGVPQGSVLGPLLFSIYTSSLGPVIQRHGFSYHCYADDTQLYLSFHPDDPSVPARISACLLDISHWMKDHHLQLNLAKTEMLVVSANPTLHHNFSIQMDGATITASKMVKSLGVTIDDQLNFSDHISRTARSCRFALYNIRKIRPFLSEHAAQLLVQALVLSKLDYCNSLLALLPANSIKPLQLLQNAAARVVFNEPKRAHVTPLLVRLHWLPVAARIKFKTLMFAYKVTSGLAPSYLHSLLQIYVPSRNLRSVNERRLVVPSQRGKKSLSRTLTLNLPSWWNELPNCIRTAESLAIFKKRLKTQLFSLHFTS

SEQ ID NO: 344 - protein, 965 aa, synthetic construct
MCFLIPVVTNTRKTREVRCKRNPHNLRSIHVSTISQLSLSVGLWNCQSAVNKADFITSIATYSDYNLMALTETWLRPEDTATHATLSANFSFSHTPRQTGRGGGTGLLISKEWKFTLIPSLPTISSFEFHAVTIIHPFYINVVVIYRPPGKLGHFLDELDVLLSSFSNFDTPLLVLGDFNIYVDKPQAADFQTLLASFDLKRAPTSATHKSGNQLDLIYTRHCFTDQTIVTPLQISDHFLLSLNIHITPEPPHTPTLVTFRRNLRSLSPNRLSTIVSDSLPPSRKLTALDSNSATNTLCSTLASCLDRLCPLASRPARASPPAPWLSDALREHRSKLRAAERIWRKTKNPAHLNTYQTLLSSFSAEVTSAKQTYYRLKINNATNPRLLFKTFSSLLYPPPPPASSTLTTDDFATFFCTKTAKISAQFAAPTTNTQDTTPTPHTLTSFSQLSESEVSKLVLSSHATTCPLDPIPSHLLQAISPAVIPTLTHIINTSLDSGLFPTTFKQARVTPLLKKPNLDHTLLENYRPVSLLPFMAKILEKVVFNQVLDFLTQNNLMDNKQSGFKKGHSTETALLSVVEDLRLAKADSKSSVLILLDLSAAFDTVNHQILLSTLESLGVAGTVIQWFRSYLSDRSFRVSWRGEVSNLQHLNTGVPQGSVLGPLLFSIYTSSLGPVIQRHGFSYHCYADDTQLYLSFHPDDPSVPARISACLLDISHWMKDHHLQLNLAKTEMLVVSANPTLHHNFSIQMDGATITASKMVKSLGVTIDDQLNFSDHISRTARSCRFALYNIRKIRPFLSEHAAQLLVQALVLSKLDYCNSLLALLPANSIKPLQLLQNAAARVVFNEPKRAHVTPLLVRLHWLPVAARIKFKTLMFAYKVTSGLAPSYLHSLLQIYVPSRNLRSVNERRLVVPSQRGKKSLSRTLTLNLPSWWNELPNCIRTAESLAIFKKRLKTQLFSLHFTS

SEQ ID NO: 345 - protein, 965 aa, synthetic construct
MCFLIPVVTNTRKTREVRCKRNPHNLRSIHVSTISQLSLSVGLWNCQSAVNKADFITSIATYSDYNLMALTETWLRPEDTATHATLSANFSFSHTPRQTGRGGGTGLLISKEWKFTLIPSLPTISSFEFHAVTIIHPFYINVVVIYRPPGKLGHFLDELDVLLSSFSNFDTPLLVLGDFNIYVDKPQAADFQTLLASFDLKRAPTSATHKSGNQLDLIYTRHCFTDQTIVTPLQISDHFLLSLNIHITPEPPHTPTLVTFRRNLRSLSPNRLSTIVSDSLPPSRKLTALDSNSATNTLCSTLASCLDRLCPLASRPARASPPAPWLSDALREHRSKLRAAERIWRKTKNPAHLLTYQTLLSSFSAEVTSAKQTYYRLKINNATNPRLLFKTFSSLLYPPPPPASSTLTTDDFATFFCTKTAKISAQFAAPTTNTQDTTPTPHTLTSFSQLSESEVSKLVLSSHATTCPLDPIPSHLLQAISPAVIPTLTHIINTSLDSGLFPTTFKQARVTPLLKKPNLDHTLLENYRPVSLLPFMAKILEKVVFNQVLDFLTQNNLMDNKQSGFKKGHSTETALLSVVEDLRLAKAASKSSVLILLDLSAAFDTVNHQILLSTLESLGVAGTVIQWFRSYLSDRSFRVSWRGEVSNLQHLNTGVPQGSVLGPLLFSIYTSSLGPVIQRHGFSYHCYADDTQLYLSFHPDDPSVPARISACLLDISHWMKDHHLQLNLAKTEMLVVSANPTLHHNFSIQMDGATITASKMVKSLGVTIDDQLNFSDHISRTARSCRFALYNIRKIRPFLSEHAAQLLVQALVLSKLDYCNSLLALLPANSIKPLQLLQNAAARVVFNEPKRAHVTPLLVRLHWLPVAARIKFKTLMFAYKVTSGLAPSYLHSLLQIYVPSRNLRSVNERRLVVPSQRGKKSLSRTLTLNLPSWWNELPNCIRTAESLAIFKKRLKTQLFSLHFTS

SEQ ID NO: 346 - protein, 965 aa, synthetic construct
MCFLIPVVTNTRKTREVRCKRNPHNLRSIHVSTISQLSLSVGLWNCQSAVNKADFITSIATYSDYNLMALTETWLRPEDTATHATLSANFSFSHTPRQTGRGGGTGLLISKEWKFTLIPSLPTISSFEFHAVTIIHPFYINVVVIYRPPGKLGHFLDELDVLLSSFSNFDTPLLVLGDFNIYVDKPQAADFQTLLASFDLKRAPTSATHKSGNQLDLIYTRHCFTDQTIVTPLQISDHFLLSLNIHITPEPPHTPTLVTFRRNLRSLSPNRLSTIVSDSLPPSRKLTALDSNSATNTLCSTLASCLDRLCPLASRPARASPPAPWLSDALREHRSKLRAAERIWRKTKNPAHLLTYQTLLSSFSAEVTSAKQTYYRLKINNATNPRLLFKTFSSLLYPPPPPASSTLTTDDFATFFCTKTAKISAQFAAPTTNTQDTTPTPHTLTSFSQLSESEVSKLVLSSHATTCPLDPIPSHLLQAISPAVIPTLTHIINTSLDSGLFPTTFKQARVTPLLKKPNLDHTLLENYRPVSLLPFMAKILEKVVFNQVLDFLTQNNLMDNKQSGFKKGHSTETALLSVVEDLRLAKADSKSSVLILLDLSAAFDTVNHQILLSTLRKLGVAGTVIQWFRSYLSDRSFRVSWRGEVSNLQHLNTGVPQGSVLGPLLFSIYTSSLGPVIQRHGFSYHCYADDTQLYLSFHPDDPSVPARISACLLDISHWMKDHHLQLNLAKTEMLVVSANPTLHHNFSIQMDGATITASKMVKSLGVTIDDQLNFSDHISRTARSCRFALYNIRKIRPFLSEHAAQLLVQALVLSKLDYCNSLLALLPANSIKPLQLLQNAAARVVFNEPKRAHVTPLLVRLHWLPVAARIKFKTLMFAYKVTSGLAPSYLHSLLQIYVPSRNLRSVNERRLVVPSQRGKKSLSRTLTLNLPSWWNELPNCIRTAESLAIFKKRLKTQLFSLHFTS

SEQ ID NO: 347 - protein, 965 aa, synthetic construct
MCFLIPVVTNTRKTREVRCKRNPHNLRSIHVSTISQLSLSVGLWNCQSAVNKADFITSIATYSDYNLMALTETWLRPEDTATHATLSANFSFSHTPRQTGRGGGTGLLISKEWKFTLIPSLPTISSFEFHAVTIIHPFYINVVVIYRPPGKLGHFLDELDVLLSSFSNFDTPLLVLGDFNIYVDKPQAADFQTLLASFDLKRAPTSATHKSGNQLDLIYTRHCFTDQTIVTPLQISDHFLLSLNIHITPEPPHTPTLVTFRRNLRSLSPNRLSTIVSDSLPPSRKLTALDSNSATNTLCSTLASCLDRLCPLASRPARASPPAPWLSDALREHRSKLRAAERIWRKTKNPAHLLTYQTLLSSFSAEVTSAKQTYYRLKINNATNPRLLFKTFSSLLYPPPPPASSTLTTDDFATFFCTKTAKISAQFAAPTTNTQDTTPTPHTLTSFSQLSESEVSKLVLSSHATTCPLDPIPSHLLQAISPAVIPTLTHIINTSLDSGLFPTTFKQARVTPLLKKPNLDHTLLENYRPVSLLPFMAKILEKVVFNQVLDFLTQNNLMDNKQSGFKKGHSTETALLSVVEDLRLAKADSKSSVLILLDLSAAFDTVNHQILLSTLESLGVAGTVIQWFRSYLSDRSFRVSWRGEVSKLQHLNTGVPQGSVLGPLLFSIYTSSLGPVIQRHGFSYHCYADDTQLYLSFHPDDPSVPARISACLLDISHWMKDHHLQLNLAKTEMLVVSANPTLHHNFSIQMDGATITASKMVKSLGVTIDDQLNFSDHISRTARSCRFALYNIRKIRPFLSEHAAQLLVQALVLSKLDYCNSLLALLPANSIKPLQLLQNAAARVVFNEPKRAHVTPLLVRLHWLPVAARIKFKTLMFAYKVTSGLAPSYLHSLLQIYVPSRNLRSVNERRLVVPSQRGKKSLSRTLTLNLPSWWNELPNCIRTAESLAIFKKRLKTQLFSLHFTS

SEQ ID NO: 348 - protein, 965 aa, synthetic construct
MCFLIPVVTNTRKTREVRCKRNPHNLRSIHVSTISQLSLSVGLWNCQSAVNKADFITSIATYSDYNLMALTETWLRPEDTATHATLSANFSFSHTPRQTGRGGGTGLLISKEWKFTLIPSLPTISSFEFHAVTIIHPFYINVVVIYRPPGKLGHFLDELDVLLSSFSNFDTPLLVLGDFNIYVDKPQAADFQTLLASFDLKRAPTSATHKSGNQLDLIYTRHCFTDQTIVTPLQISDHFLLSLNIHITPEPPHTPTLVTFRRNLRSLSPNRLSTIVSDSLPPSRKLTALDSNSATNTLCSTLASCLDRLCPLASRPARASPPAPWLSDALREHRSKLRAAERIWRKTKNPAHLLTYQTLLSSFSAEVTSAKQTYYRLKINNATNPRLLFKTFSSLLYPPPPPASSTLTTDDFATFFCTKTAKISAQFAAPTTNTQDTTPTPHTLTSFSQLSESEVSKLVLSSHATTCPLDPIPSHLLQAISPAVIPTLTHIINTSLDSGLFPTTFKQARVTPLLKKPNLDHTLLENYRPVSLLPFMAKILEKVVFNQVLDFLTQNNLMDNKQSGFKKGHSTETALLSVVEDLRLAKADSKSSVLILLDLSAAFDTVNHQILLSTLESLGVAGTVIQWFRSYLSDRSFRVSWRGEVSNLQHLNTGVPQGSVLGPLLFSIYTSSLGPVIQRHGFSYHCYVDDTQLYLSFHPDDPSVPARISACLLDISHWMKDHHLQLNLAKTEMLVVSANPTLHHNFSIQMDGATITASKMVKSLGVTIDDQLNFSDHISRTARSCRFALYNIRKIRPFLSEHAAQLLVQALVLSKLDYCNSLLALLPANSIKPLQLLQNAAARVVFNEPKRAHVTPLLVRLHWLPVAARIKFKTLMFAYKVTSGLAPSYLHSLLQIYVPSRNLRSVNERRLVVPSQRGKKSLSRTLTLNLPSWWNELPNCIRTAESLAIFKKRLKTQLFSLHFTS

SEQ ID NO: 349 - protein, 965 aa, synthetic construct
MCFLIPVVTNTRKTREVRCKRNPHNLRSIHVSTISQLSLSVGLWNCQSAVNKADFITSIATYSDYNLMALTETWLRPEDTATHATLSANFSFSHTPRQTGRGGGTGLLISKEWKFTLIPSLPTISSFEFHAVTIIHPFYINVVVIYRPPGKLGHFLDELDVLLSSFSNFDTPLLVLGDFNIYVDKPQAADFQTLLASFDLKRAPTSATHKSGNQLDLIYTRHCFTDQTIVTPLQISDHFLLSLNIHITPEPPHTPTLVTFRRNLRSLSPNRLSTIVSDSLPPSRKLTALDSNSATNTLCSTLASCLDRLCPLASRPARASPPAPWLSDALREHRSKLRAAERIWRKTKNPAHLLTYQTLLSSFSAEVTSAKQTYYRLKINNATNPRLLFKTFSSLLYPPPPPASSTLTTDDFATFFCTKTAKISAQFAAPTTNTQDTTPTPHTLTSFSQLSESEVSKLVLSSHATTCPLDPIPSHLLQAISPAVIPTLTHIINTSLDSGLFPTTFKQARVTPLLKKPNLDHTLLENYRPVSLLPFMAKILEKVVFNQVLDFLTQNNLMDNKQSGFKKGHSTETALLSVVEDLRLAKADSKSSVLILLDLSAAFDTVNHQILLSTLESLGVAGTVIQWFRSYLSDRSFRVSWRGEVSNLQHLNTGVPQGSVLGPLLFSIYTSSLGPVIQRHGFSYHCYIDDTQLYLSFHPDDPSVPARISACLLDISHWMKDHHLQLNLAKTEMLVVSANPTLHHNFSIQMDGATITASKMVKSLGVTIDDQLNFSDHISRTARSCRFALYNIRKIRPFLSEHAAQLLVQALVLSKLDYCNSLLALLPANSIKPLQLLQNAAARVVFNEPKRAHVTPLLVRLHWLPVAARIKFKTLMFAYKVTSGLAPSYLHSLLQIYVPSRNLRSVNERRLVVPSQRGKKSLSRTLTLNLPSWWNELPNCIRTAESLAIFKKRLKTQLFSLHFTS

SEQ ID NO: 350 - protein, 965 aa, synthetic construct
MCFLIPVVTNTRKTREVRCKRNPHNLRSIHVSTISQLSLSVGLWNCQSAVNKADFITSIATYSDYNLMALTETWLRPEDTATHATLSANFSFSHTPRQTGRGGGTGLLISKEWKFTLIPSLPTISSFEFHAVTIIHPFKINVVVIYRPPGKLGHFLDELDVLLSSFSNFDTPLLVLGDFNIYVDKPQAADFQTLLASFDLKRAPTSATHKSGNQLDLIYTRHCFTDQTIVTPLQISDHFLLSLNIHITPEPPHTPTLVTFRRNLRSLSPNRLSTIVSDSLPPSRKLTALDSNSATNTLCSTLASCLDRLCPLASRPARASPPAPWLSDALREHRSKLRAAERIWRKTKNPAHLLTYQTLLSSFSAEVTSAKQTYYRLKINNATNPRLLFKTFSSLLYPPPPPASSTLTTDDFATFFCTKTAKISAQFAAPTTNTQDTTPTPHTLTSFSQLSESEVSKLVLSSHATTCPLDPIPSHLLQAISPAVIPTLTHIINTSLDSGLFPTTFKQARVTPLLKKPNLDHTLLENYRPVSLLPFMAKILEKVVFNQVLDFLTQNNLMDNKQSGFKKGHSTETALLSVVEDLRLAKADSKSSVLILLDLSAAFDTVNHQILLSTLESLGVAGTVIQWFRSYLSDRSFRVSWRGEVSNLQHLNTGVPQGSVLGPLLFSIYTSSLGPVIQRHGFSYHCYADDTQLYLSFHPDDPSVPARISACLLDISHWMKDHHLQLNLAKTEMLVVSANPTLHHNFSIQMDGATITASKMVKSLGVTIDDQLNFSDHISRTARSCRFALYNIRKIRPFLSEHAAQLLVQALVLSKLDYCNSLLALLPANSIKPLQLLQNAAARVVFNEPKRAHVTPLLVRLHWLPVAARIKFKTLMFAYKVTSGLAPSYLHSLLQIYVPSRNLRSVNERRLVVPSQRGKKSLSRTLTLNLPSWWNELPNCIRTAESLAIFKKRLKTQLFSLHFTS

SEQ ID NO: 351 - protein, 965 aa, synthetic construct
MCFLIPVVTNTRKTREVRCKRNPHNLRSIHVSTISQLSLSVGLWNCQSAVNKADFITSIATYSKYNLMALTETWLRPEDTATHATLSANFSFSHTPRQTGRGGGTGLLISKEWKFTLIPSLPTISSFEFHAVTIIHPFYINVVVIYRPPGKLGHFLDELDVLLSSFSNFDTPLLVLGDFNIYVDKPQAADFQTLLASFDLKRAPTSATHKSGNQLDLIYTRHCFTDQTIVTPLQISDHFLLSLNIHITPEPPHTPTLVTFRRNLRSLSPNRLSTIVSDSLPPSRKLTALDSNSATNTLCSTLASCLDRLCPLASRPARASPPAPWLSDALREHRSKLRAAERIWRKTKNPAHLLTYQTLLSSFSAEVTSAKQTYYRLKINNATNPRLLFKTFSSLLYPPPPPASSTLTTDDFATFFCTKTAKISAQFAAPTTNTQDTTPTPHTLTSFSQLSESEVSKLVLSSHATTCPLDPIPSHLLQAISPAVIPTLTHIINTSLDSGLFPTTFKQARVTPLLKKPNLDHTLLENYRPVSLLPFMAKILEKVVFNQVLDFLTQNNLMDNKQSGFKKGHSTETALLSVVEDLRLAKADSKSSVLILLDLSAAFDTVNHQILLSTLESLGVAGTVIQWFRSYLSDRSFRVSWRGEVSNLQHLNTGVPQGSVLGPLLFSIYTSSLGPVIQRHGFSYHCYADDTQLYLSFHPDDPSVPARISACLLDISHWMKDHHLQLNLAKTEMLVVSANPTLHHNFSIQMDGATITASKMVKSLGVTIDDQLNFSDHISRTARSCRFALYNIRKIRPFLSEHAAQLLVQALVLSKLDYCNSLLALLPANSIKPLQLLQNAAARVVFNEPKRAHVTPLLVRLHWLPVAARIKFKTLMFAYKVTSGLAPSYLHSLLQIYVPSRNLRSVNERRLVVPSQRGKKSLSRTLTLNLPSWWNELPNCIRTAESLAIFKKRLKTQLFSLHFTS

SEQ ID NO: 352 - protein, 965 aa, synthetic construct
MCFLIPVVTNTRKTREVRCKRNPHNLRSIHVSTISQLSLSVGLWNCQSAVNKADFITSIATYSDYNLMALTETWLRPEDTATHATLSANFSFSHTPRQTGRGGGTGLLISKEWKFTLIPSLPTISSFEFHAVTIIHPFYINVVVIYRPPGKLGHFLDELDVLLSSFSNFDTPLLVLGDFNIYVDKPQAADFQTLLASFDLKRAPTSATHKSGNQLDLIYTRHCFTDQTIVTPLQISDHFLLSLNIHITPEPPHTPTLVTFRRNLRSLSPNRLSTIVSDSLPPSRKLTALDSNSATNTLCSTLASCLDRLCPLASRPARASPPAPWLSDALREHRSKLRAAERIWRKTKNPAHLLTYQTLLSSFSAEVTSAKQTYYRLKINNATNPRLLFKTFSSLLYPPPPPASSTLTTDDFATFFCTKTAKISAQFAAPTTNTQDTTPTPHTLTSFSQLSESEVSKLVLSSHATTCPLDPIPSHLLQAISPAVIPTLTHIINTSLDSGLFPTTFKQARVTPLLKKPNLDHTLLENYRPVSLLPFMAKILEKVVFNQVLDFLTQNNLMDNKQSGFKKGHSTETALLSVVEDLRLAKADSKSSVLILLDLSAAFDTVNHQILLSTLESLGVAGTVIQWFRSYLSDRSFRVSWRGEVSNLQHLNTGVPQGSVLGPLLFSIYTSSLGPVIQRHGFSYHCYADDTQLYLSFHPDDPSVPARISACLLDISHWMKDHHLQLNLAKTEMLVVSANPTLHHNFSIQMDGATITASKMVKSLGVTIDDQLNFSDHISRTARSCRFALYNIRKIRPFLSEHAAQLLVQALVLSKLDYCNSLLALLPANSIKPLQLLQNAAARVVFNEPKRAHVTPLLVRLHWLPVAARIKFKTLMFAYKVTSGLAPSYLHSLLQIYVPSRNLRSVNERRLVVPSQRGKKSLSRTLTLNLPSWWNELPNCIRTAESLAIFKKRLKTQLFRLHFTS

SEQ ID NO: 353 - protein, 965 aa, synthetic construct
MCFLIPVVTNTRKTREVRCKRNPHNLRSIHVSTISQLSLSVGLWNCQSAVNKADFITSIATYSDYNLMALTETWLRPEDTATHATLSANFSFSHTPRQTGRGGGTGLLISKEWKFTLIPSLPTISSFEFHAVTIIHPFYINVVVIYRPPGKLGHFLDELDVLLSSFSNFDTPLLVLGDFNIYVDKPQAADFQTLLASFDLKRAPTSATHKSGNQLDLIYTRHCFTDQTIVTPLQISDHFLLSLNIHITPEPPHTPTLVTFRRNLRSLSPNRLSTIVSDSLPPSRKLTALDSNSATNTLCSTLASCLDRLCPLASRPARASPPAPWLSDALREHRSKLRAAERIWRKTKNPAHLLTYQTLLSSFSAEVTSAKQTYYRLKINNATNPRLLFKTFSSLLYPPPPPASSTLTTDDFATFFCTKTAKISAQFAAPTTNTQDTTPTPHTLTSFSQLSESEVSKLVLSSHATTCPLDPIPSHLLQAISPAVIPTLTHIINTSLDSGLFPTTFKQARVTPLLKKPNLDHTLLENYRPVSLLPFMAKILEKVVFNQVLTFLTQNNLMDNKQSGFKKGHSTETALLSVVEDLRLAKADSKSSVLILLDLSAAFDTVNHQILLSTLESLGVAGTVIQWFRSYLSDRSFRVSWRGEVSNLQHLNTGVPQGSVLGPLLFSIYTSSLGPVIQRHGFSYHCYADDTQLYLSFHPDDPSVPARISACLLDISHWMKDHHLQLNLAKTEMLVVSANPTLHHNFSIQMDGATITASKMVKSLGVTIDDQLNFSDHISRTARSCRFALYNIRKIRPFLSEHAAQLLVQALVLSKLDYCNSLLALLPANSIKPLQLLQNAAARVVFNEPKRAHVTPLLVRLHWLPVAARIKFKTLMFAYKVTSGLAPSYLHSLLQIYVPSRNLRSVNERRLVVPSQRGKKSLSRTLTLNLPSWWNELPNCIRTAESLAIFKKRLKTQLFSLHFTS

SEQ ID NO: 354 - protein, 965 aa, synthetic construct
MCFLIPVVTNTRKTREVRCKRNPHNLRSIHVSTISQLSLSVGLWNCQSAVNKADFITSIATYSDYNLMALTETWLRPEDTATHATLSANFSFSHTPRQTGRGGGTGLLISKEWKFTLIPSLPTISSFEFHAVTIIHPFYINVVVIYRPPGKLGHFLDELDVLLSSFSNFDTPLLVLGDFNIYVDKPQAADFQTLLASFDLKRAPTSATHKSGNQLDLIYTRHCFTDQTIVTPLQISDHFLLSLNIHITPEPPHTPTLVTFRRNLRSLSPNRLSTIVSDSLPPSRKLTALDSNSATNTLCSTLASCLDRLCPLASRPARASPPAPWLSDALREHRSKLRAAERIWRKTKNPAHLLTYQTLLSSFSAEVTSAKQTYYRLKINNATNPRLLFKTFSSLLYPPPPPASSTLTTDDFATFFCTKTAKISAQFAAPTTNTQDTTPTPHTFTSFSQLSESEVSKLVLSSHATTCPLDPIPSHLLQAISPAVIPTLTHIINTSLDSGLFPTTFKQARVTPLLKKPNLDHTLLENYRPVSLLPFMAKILEKVVFNQVLDFLTQNNLMDNKQSGFKKGHSTETALLSVVEDLRLAKADSKSSVLILLDLSAAFDTVNHQILLSTLESLGVAGTVIQWFRSYLSDRSFRVSWRGEVSNLQHLNTGVPQGSVLGPLLFSIYTSSLGPVIQRHGFSYHCYADDTQLYLSFHPDDPSVPARISACLLDISHWMKDHHLQLNLAKTEMLVVSANPTLHHNFSIQMDGATITASKMVKSLGVTIDDQLNFSDHISRTARSCRFALYNIRKIRPFLSEHAAQLLVQALVLSKLDYCNSLLALLPANSIKPLQLLQNAAARVVFNEPKRAHVTPLLVRLHWLPVAARIKFKTLMFAYKVTSGLAPSYLHSLLQIYVPSRNLRSVNERRLVVPSQRGKKSLSRTLTLNLPSWWNELPNCIRTAESLAIFKKRLKTQLFSLHFTS

SEQ ID NO: 355 - protein, 965 aa, synthetic construct
MCFLIPVVTNTRKTREVRCKRNPHNLRSIHVSTISQLSLSVGLWNCQSAVNKADFITSIATYSDYNLMALTETWLRPEDTATHATLSANFSFSHTPRQTGRGGGTGLLISKEWKFTLIPSLPTISSFEFHAVTIIHPFYINVVVIYRPPGKLGHFLDELDVLLSSFSNFDTPLLVLGDFNIYVDKPQAADFQTLLASFDLKRAPTSATHKSGNQLDLIYTRHCFTDQTIVTPLQISDHFLLSLNIHITPEPPHTPTLVTFRRNLRSLSPNRLSTIVSDSLPPSRKLTALDSNSATNTLCSTLASCLDRLCPLASRPARASPPAPWLSDALREHRSKLRAAERIWRKTKNPAHLLTYQTLLSSFSAEVTSAKQTYYRLKINNATNPRLLFKTFSSLLYPPPPPASSTLTTDDFATFFCTKTAKISAQFAAPTTNTQDTTPTPHTLTSFSQLSESEVSKLVLSSHATTCPLDPIPSHLLQAISPAVIPTLTHIINTSLDSGLFPTTFKQARVTPLLKKPNLDHTLLENYRPVSLLPFMAKILEKVVFNQVLDFLTQNNLMDNKQSGFKKGHSTETALLSVVEDLRLAKADSKSSVLILLDLSAAFDTVNHQILLSTLESLGVAGTVIQWFRSYLSDRSFRVSWRGEVSNLQHLNTGVPQGSVLGPLLFSIYTSSLGPVIQRHGFSYHCYADDTQLYLSFHPDDPSVPARISACLLDISHWMKDHHLQLNLAKTEMLVVSANPTLHHNFSIQMDGATITASKMVKSLGVTIDHQLNFSDHISRTARSCRFALYNIRKIRPFLSEHAAQLLVQALVLSKLDYCNSLLALLPANSIKPLQLLQNAAARVVFNEPKRAHVTPLLVRLHWLPVAARIKFKTLMFAYKVTSGLAPSYLHSLLQIYVPSRNLRSVNERRLVVPSQRGKKSLSRTLTLNLPSWWNELPNCIRTAESLAIFKKRLKTQLFSLHFTS

SEQ ID NO: 356 - protein, 965 aa, synthetic construct
MCFLIPVVTNTRKTREVRCKRNPHNLRSIHVSTISQLSLSVGLWNCQSAVNKADFITSIATYSDYNLMALTETWLRPEDTATHATLSANFSFSHTPRQTGRGGGTGLLISKEWKFTLIPSLPTISSFEFHAVTIIHPFYINVVVIYRPPGKLGHFLDELDVLLSSFSNFDTPLLVLGDFNIYVDKPQAADFQTLLASFDLKRAPTSATHKSGNQLDLIYTRHCFTDQTIVTPLQISDHFLLSLNIHITPEPPHTPTLVTFRRNLRSLSPNRLSTIVSDSLPPSRKLTALDSNSATNTLCSTLASCLDRLCPLASRPARASPPAPWLSDALREHRSKLRAAERIWRKTKNPAHLLTYQTLLSSFSAEVTSAKQTYYRLKINNATNPRLLFKTFSSLLYPPPPPASSTLTTDDFATFFCTKTAKISAQFAAPTTNTQDTTPTPHTLTSFSQLSESEVSKLVLSSHATTCPLDPIPSHLLQAISPAVIPTLTHIINTSLDSGLFPTTFKQARVTPLLKKPNLDHTLLENYRPVSLLPFMAKILEKVVFNQVLDFLTQNNLMDNKQSGFKKGHSTETALLSVVEDLRLAKADSKSSVLILLDLSAAFDTVNHQILLSTLESLGVAGTVLQWFRSYLSDRSFRVSWRGEVSNLQHLNTGVPQGSVLGPLLFSIYTSSLGPVIQRHGFSYHCYADDTQLYLSFHPDDPSVPARISACLLDISHWMKDHHLQLNLAKTEMLVVSANPTLHHNFSIQMDGATITASKMVKSLGVTIDDQLNFSDHISRTARSCRFALYNIRKIRPFLSEHAAQLLVQALVLSKLDYCNSLLALLPANSIKPLQLLQNAAARVVFNEPKRAHVTPLLVRLHWLPVAARIKFKTLMFAYKVTSGLAPSYLHSLLQIYVPSRNLRSVNERRLVVPSQRGKKSLSRTLTLNLPSWWNELPNCIRTAESLAIFKKRLKTQLFSLHFTS

SEQ ID NO: 357 - protein, 965 aa, synthetic construct
MCFLIPVVTNTRKTREVRCKRNPHNLRSIHVSTISQLSLSVGLWNCQSAVNKADFITSIATYSDYNLMALTETWLRPEDTATHATLSANFSFSHTPRQTGRGGGTGLLISKEWKFTLIPSLPTISSFEFHAVTIIHPFYINVVVIYRPPGKLGHFLDELDVLLSSFSNFDTPLLVLGDFNIYVDKPQAADFQTLLASFDLKRAPTSATHKSGNQLDLIYTRHCFTDQTIVTPLQISDHFLLSLNIHITPEPPHTPTLVTFRRNLRSLSPNRLSTIVSDSLPPSRKLTALDSNSATNTLCSTLASCLDRLCPLASRPARASPPAPWLSDALREHRSKLRAAERIWRKTKNPAHLLTYQTLLSSFSAEVTSAKQTYYRLKINNATNPRLLFKTFSSLLYPPPPPASSTLTTDDFATFFCTKTAKISAQFAAPTTNTQDTTPTPHTLTSFSQLSESEVSKLVLSSHATTCPLDPIPSHLLQAISPAVIPTLTHIINTSLDSGLFPTTFKQARVTPLLKKPNLDPTLLENYRPVSLLPFMAKILEKVVFNQVLDFLTQNNLMDNKQSGFKKGHSTETALLSVVEDLRLAKADSKSSVLILLDLSAAFDTVNHQILLSTLESLGVAGTVIQWFRSYLSDRSFRVSWRGEVSNLQHLNTGVPQGSVLGPLLFSIYTSSLGPVIQRHGFSYHCYADDTQLYLSFHPDDPSVPARISACLLDISHWMKDHHLQLNLAKTEMLVVSANPTLHHNFSIQMDGATITASKMVKSLGVTIDDQLNFSDHISRTARSCRFALYNIRKIRPFLSEHAAQLLVQALVLSKLDYCNSLLALLPANSIKPLQLLQNAAARVVFNEPKRAHVTPLLVRLHWLPVAARIKFKTLMFAYKVTSGLAPSYLHSLLQIYVPSRNLRSVNERRLVVPSQRGKKSLSRTLTLNLPSWWNELPNCIRTAESLAIFKKRLKTQLFSLHFTS

SEQ ID NO: 358 - protein, 965 aa, synthetic construct
MCFLIPVVTNTRKTREVRCKRNPHNLRSIHVSTISQLSLSVGLWNCQSAVNKADFITSIATYSDYNLMALTETWLRPEDTATHATLSANFSFSHTPRQTGRGGGTGLLISKEWKFTLIPSLPTISSFEFHAVTIIHPFYINVVVIYRPPGKLGHFLDELDVLLSSFSNFDTPLLVLGDFNIYVDKPQAADFQTLLASFDLKRAPTSATHKSGNQLDLIYTRHCFTDQTIVTPLQISDHFLLSLNIHITPEPPHTPTLVTFRRNLRSLSPNRLSTIVSDSLPPSRKLTALDSNSATNTLCSTLASCLDRLCPLASRPARASPPAPWLSDALREHRSKLRAAERIWRKTKNPAHLLTYQTLLSSFSAEVTSAKQTYYRLKINNATNPRLLFKTFSSLLYPPPPPASSTLTTDDFATFFCTKTAKISAQFAAPTTNTQDTTPTPHTLTSFSQLSESEVSKLVLSSHATTCPLDPIPSHLLQAISPAVIPTLTHIINTSLDSGLFPTTFKQARVTPLLKKPNLDHTLLENYRPVSLLPFMAKILEKVVFNQVLDFLTQNNLMDNKQSGFKKGHSTETALLSVVEDLRLAKADSKSSVLILLDLSAAFDTVNHQILLSTLESLGVAGTVIQWFRSYLSDRSFRVSWRGEVSNLQHLNTGVPQGSVLGPLLFSIYTSSLGPVIQRHGFSYHCYADDTQLYLSFHPDDPSVPARISACLLDISHWMKDHHLQLNLAKTEMLVVPANPTLHHNFSIQMDGATITASKMVKSLGVTIDDQLNFSDHISRTARSCRFALYNIRKIRPFLSEHAAQLLVQALVLSKLDYCNSLLALLPANSIKPLQLLQNAAARVVFNEPKRAHVTPLLVRLHWLPVAARIKFKTLMFAYKVTSGLAPSYLHSLLQIYVPSRNLRSVNERRLVVPSQRGKKSLSRTLTLNLPSWWNELPNCIRTAESLAIFKKRLKTQLFSLHFTS

SEQ ID NO: 359 - protein, 965 aa, synthetic construct
MCFLIPVVTNTRKTREVRCKRNPHNLRSIHVSTISQLSLSVGLWNCQSAVNKADFITSIATYSDYNLMALTETWLRPEDTATHATLSANFSFSHTPRQTGRGGGTGLLISKEWKFTLIPSLPTISSFEFHAVTIIHPFYINVVVIYRPPGKLGHFLDELDVLLSSFSNFDTPLLVLGDFNIYVDKPQAADFQTLLASFDLKRAPTSATHKSGNQLDLIYTRHCFTDQTIVTPLQISDHFLLSLNIHITPEPPHTPTLVTFRRNLRSLSPNRLSTIVSDSLPPSRKLTALDSNSATNTLCSTLASCLDRLCPLASRPARASPPAPWLSDALREHRSKLRAAERIWRKTKNPAHLLTYQTLLSSFSAEVTSAKQTYYRLKINNATNPRLLFKTFSSLLYPPPPPASSTLTTDDFATFFCTKTAKISAQFAAPTTNTQDTTPTPHTLTSFSQLSESEVSKLVLSSHATTCPLDPIPSHLLQAISPAVIPTLTHIINTSLDSGLFPTTFKQARVTPLLKKPNLDHTLLENYRPVSLLPFMAKILEKVVFNQVLDFLTQNNLMDNKQSGFKKGHSTETALLSVVEDLRLAKADSKSSVLILLDLSAAFDTVNHQILLSTLESLGVAGTVIQWFRSYLSDRSFRVSWRGEVSNLQHLNTGVPQGSVLGPLLFSIYTSSLGPVIQRHGFSYHCYADDTQLYLSFHPDDPSVAARISACLLDISHWMKDHHLQLNLAKTEMLVVSANPTLHHNFSIQMDGATITASKMVKSLGVTIDDQLNFSDHISRTARSCRFALYNIRKIRPFLSEHAAQLLVQALVLSKLDYCNSLLALLPANSIKPLQLLQNAAARVVFNEPKRAHVTPLLVRLHWLPVAARIKFKTLMFAYKVTSGLAPSYLHSLLQIYVPSRNLRSVNERRLVVPSQRGKKSLSRTLTLNLPSWWNELPNCIRTAESLAIFKKRLKTQLFSLHFTS

SEQ ID NO: 360 - protein, 965 aa, synthetic construct
MCFLIPVVTNTRKTREVRCKRNPHNLRSIHVSTISQLSLSVGLWNCQSAVNKADFITSIATYSDYNLMALTETWLRPEDTATHATLSANFSFSHTPRQTGRGGGTGLLISKEWKFTLIPSLPTISSFEFHAVTIIHPFYINVVVIYRPPGKLGHFLDELDVLLSSFSNFDTPLLVLGDFNIYVDKPQAADFQTLLASFDLKRAPTSATHKSGNQLDLIYTRHCFTDQTIVTPLQISDHFLLSLNIHITPEPPHTPTLVTFRRNLRSLSPNRLSTIVSDSLPPSRKLTALDSNSATNTLCSTLASCLDRLCPLASRPARASPPAPWLSDALREHRSKLRAAERIWRKTKNPAHLLTYQTLLSSFSAEVTSAKQTYYRLKINNATNPRLLFKTFSSLLYPPPPPASSTLTTDDFATFFCTKTAKISAQFAAPTTNTQDTTPTPHTLTSFSQLSESEVSKLVLSSHATTCPLDPIPSHLLQAISPAVIPTLTHIINTSLDSGLFPTTFKQARVTPLLKKPNLDHTLLENYRPVSLLPFMAKILEKVVFNQVLDFLTQNNLLDNKQSGFKKGHSTETALLSVVEDLRLAKADSKSSVLILLDLSAAFDTVNHQILLSTLESLGVAGTVIQWFRSYLSDRSFRVSWRGEVSNLQHLNTGVPQGSVLGPLLFSIYTSSLGPVIQRHGFSYHCYADDTQLYLSFHPDDPSVPARISACLLDISHWMKDHHLQLNLAKTEMLVVSANPTLHHNFSIQMDGATITASKMVKSLGVTIDDQLNFSDHISRTARSCRFALYNIRKIRPFLSEHAAQLLVQALVLSKLDYCNSLLALLPANSIKPLQLLQNAAARVVFNEPKRAHVTPLLVRLHWLPVAARIKFKTLMFAYKVTSGLAPSYLHSLLQIYVPSRNLRSVNERRLVVPSQRGKKSLSRTLTLNLPSWWNELPNCIRTAESLAIFKKRLKTQLFSLHFTS

SEQ ID NO: 361 - protein, 965 aa, synthetic construct
MCFLIPVVTNTRKTREVRCKRNPHNLRSIHVSTISQLSLSVGLWNCQSAVNKADFITSIATYSDYNLMALTETWLRPEDTATHATLSANFSFSHTPRQTGRGGGTGLLISKEWKFTLIPSLPTISSFEFHAVTIIHPFYINVVVIYRPPGKLGHFLDELDVLLSSFSNFDTPLLVLGDFNIYVDKPQAADFQTLLASFDLKRAPTSATHKSGNQLDLIYTRHCFTDQTIVTPLQISDHFLLSLNIHITPEPPHTPTLVTFRRNLRSLSPNRLSTIVSDSLPPSRKLTALDSNSATNTLCSTLASCLDRLCPLASRPARASPPAPWLSDALREHRSKLRAAERIWRKTKNPAHLLTYQTLLSSFSAEVTSAKQTYYRLKINNATNPRLLFKTFSSLLYPPPPPASSTLTTDDFATFFCTKTAKISAQFAAPTTNTQDTTPTPHTLTSFSQLSESEVSKLVLSSHATTCPLDPIPSHLLQAISPAVIPTLTHIINTSLDSGLFPTTFKQARVTPLLKKPNLDHTLLENYRPVSLLPFMAKILEKVVFNQVLDFLTQNNLMDNKQSGFKKGHSTETALLSVVEDLRLAKADSKSSVLILLDLSAAFDTVNHQILLSTLESLGVAGTVIQWFRSYLSDRSFRVSWRGEVSNLQHLNTGVPQGSVLGPLLFSIYTSSLGPVIQRHGFSYHCYADDTQLYLSFHPDDPSVPARISACLLDISHWMKDHHLQLNLAKTELLVVSANPTLHHNFSIQMDGATITASKMVKSLGVTIDDQLNFSDHISRTARSCRFALYNIRKIRPFLSEHAAQLLVQALVLSKLDYCNSLLALLPANSIKPLQLLQNAAARVVFNEPKRAHVTPLLVRLHWLPVAARIKFKTLMFAYKVTSGLAPSYLHSLLQIYVPSRNLRSVNERRLVVPSQRGKKSLSRTLTLNLPSWWNELPNCIRTAESLAIFKKRLKTQLFSLHFTS

SEQ ID NO: 362 - protein, 965 aa, synthetic construct
MCFLIPVVTNTRKTREVRCKRNPHNLRSIHVSTISQLSLSVGLWNCQSAVNKADFITSIATYSDYNLMALTETWLRPEDTATHATLSANFSFSHTPRQTGRGGGTGLLISKEWKFTLIPSLPTISSFEFHAVTIIHPFYINVVVIYRPPGKLGHFLDELDVLLSSFSNFDTPLLVLGDFNIYVDKPQAADFQTLLASFDLKRAPTSATHKSGNQLDLIYTRHCFTDQTIVTPLQISDHFLLSLNIHITPEPPHTPTLVTFRRNLRSLSPNRLSTIVSDSLPPSRKLTALDSNSATNTLCSTLASCLDRLCPLASRPARASPPAPWLSDALREHRSKLRAAERIWRKTKNPAHLLTYQTLLSSFSAEVTSAKQTYYRLKINNATNPRLLFKTFSSLLYPPPPPASSTLTTDDFATFFCTKTAKISAQFAAPTTNTQDTTPTPHTLTSFSQLSESEVSKLVLSSHATTCPLDPIPSHLLQAISPAVIPTLTHIINTSLDSGLFPTTFKQARVTPLLKKPNLDHTLLENYRPVSLLPFMAKILEKVVFNQVLDFLTQNNLMDNKQSGFKKGHSTETALLSVVEDLRLAKADSKSSVLILLDLSAAFDTVNHQILLSTLESLGVAGTVIQWFRSYLSDRSFRVSWRGEVSNLQHLNTGVPQGSVLGPLLFSIYTSSLGPVIQRHGFSYHCYADDTQLYLSFHPDDPSVPARISACLLDISHWMKDHHLQLNLAKTEMLVVSANPTLHHNFSIQMDGATITASKSVKSLGVTIDDQLNFSDHISRTARSCRFALYNIRKIRPFLSEHAAQLLVQALVLSKLDYCNSLLALLPANSIKPLQLLQNAAARVVFNEPKRAHVTPLLVRLHWLPVAARIKFKTLMFAYKVTSGLAPSYLHSLLQIYVPSRNLRSVNERRLVVPSQRGKKSLSRTLTLNLPSWWNELPNCIRTAESLAIFKKRLKTQLFSLHFTS

SEQ ID NO: 363 - protein, 965 aa, synthetic construct
MCFLIPVVTNTRKTREVRCKRNPHNLRSIHVSTISQLSLSVGLWNCQSAVNKADFITSIATYSDYNLMALTETWLRPEDTATHATLSANFSFSHTPRQTGRGGGTGLLISKEWKFTLIPSLPTISSFEFHAVTIIHPFYINVVVIYRPPGKLGHFLDELDVLLSSFSNFDTPLLVLGDFNIYVDKPQAADFQTLLASFDLKRAPTSATHKSGNQLDLIYTRHCFTDQTIVTPLQISDHFLLSLNIHITPEPPHTPTLVTFRRNLRSLSPNRLSTIVSDSLPPSRKLTALDSNSATNTLCSTLASCLDRLCPLASRPARASPPAPWLSDALREHRSKLRAAERIWRKTKNPAHLLTYQTLLSSFSAEVTSAKQTYYRLKINNATNPRLLFKTFSSLLYPPPPPASSTLTTDDFATFFCTKTAKISAQFAAPTTNTQDTTPTPHTLTSFSQLSESEVSKLVLSSHATTCPLDPIPSHLLQAISPAVIPTLTHIINTSLDSGLFPTTFKQARVTPLLKKPNLDHTLLENYRPVSLLPFMAKILEKVVFNQVLDFLTQNNLMDNKQSGFKKGHSTETALLSVVEDLRLAKADSKSSVLILLDLSAAFDTVNHQILLSTLESLGVAGTVIQWFRSYLSDRSFRVSWRGEVSNLQHLNTGVPQGSVLGPLLFSIYTSSLGPVIQRHGFSYHCYADDTQLYLSFHPDDPSVPARISACLLDISHWMKDHHLQLNLAKTEMLVVSANPTLHHNFSIQLDGATITASKMVKSLGVTIDDQLNFSDHISRTARSCRFALYNIRKIRPFLSEHAAQLLVQALVLSKLDYCNSLLALLPANSIKPLQLLQNAAARVVFNEPKRAHVTPLLVRLHWLPVAARIKFKTLMFAYKVTSGLAPSYLHSLLQIYVPSRNLRSVNERRLVVPSQRGKKSLSRTLTLNLPSWWNELPNCIRTAESLAIFKKRLKTQLFSLHFTS

SEQ ID NO: 364 - protein, 965 aa, synthetic construct
MCFLIPVVTNTRKTREVRCKRNPHNLRSIHVSTISQLSLSVGLWNCQSAVNKADFITSIATYSDYNLMALTETWLRPEDTATHATLSANFSFSHTPRQTGRGGGTGLLISKEWKFTLIPSLPTISSFEFHAVTIIHPFYINVVVIYRPPGKLGHFLDELDVLLSSFSNFDTPLLVLGDFNIYVDKPQAADFQTLLASFDLKRAPTSATHKSGNQLDLIYTRHCFTDQTIVTPLQISDHFLLSLNIHITPEPPHTPTLVTFRRNLRSLSPNRLSTIVSDSLPPSRKLTALDSNSATNTLCSTLASCLDRLCPLASRPARASPPAPWLSDALREHRSKLRAAERIWRKTKNPAHLLTYQTLLSSFSAEVTSAKQTYYRLKINNATNPRLLFKTFSSLLYPPPPPASSTLTTDDFATFFCTKTAKISAQFAAPTTNTQDTTPTPHTLTSFSQLSESEVSKLVLSSHATTCPLDPIPSHLLQAISPAVIPTLTHIINTSLDSGLFPTTFKQARVTPLLKKPNLDHTLLENYRPVSLLPFMAKILEKVVFNQVLDFLTQNNLMDNKQSGFKKGHSTETALLSVVEDLRLAKADSKSSVLILLDLSAAFDTVNHQILLSTLESLGVAGTVIQWFRSYLSDRSFRVSWRGEVSNLQHLNTGVPQGSVLGPLLFSIYTSSLGPVIQRHGFSYHCYADDTQLYLSFHPDDPSVPARISACLLDISHWMKDHHLQLNLAKTEMLVVSANPTLHHNFSIQMDGATITPSKMVKSLGVTIDDQLNFSDHISRTARSCRFALYNIRKIRPFLSEHAAQLLVQALVLSKLDYCNSLLALLPANSIKPLQLLQNAAARVVFNEPKRAHVTPLLVRLHWLPVAARIKFKTLMFAYKVTSGLAPSYLHSLLQIYVPSRNLRSVNERRLVVPSQRGKKSLSRTLTLNLPSWWNELPNCIRTAESLAIFKKRLKTQLFSLHFTS

SEQ ID NO: 365 - protein, 965 aa, synthetic construct
MCFLIPVVTNTRKTREVRCKRNPHNLRSIHVSTISQLSLSVGLWNCQSAVNKADFITSIATYSDYNLMALTETWLRPEDTATHATLSANFSFSHTPRQTGRGGGTGLLISKEWKFTLIPSLPTISSFEFHAVTIIHPFYINVVVIYRPPGKLGHFLDELDVLLSSFSNFDTPLLVLGDFNIYVDKPQAADFQTLLASFDLKRAPTSATHKSGNQLDLIYTRHCFTDQTIVTPLQISDHFLLSLNIHITPEPPHTPTLVTFRRNLRSLSPNRLSTIVSDSLPPSRKLTALDSNSATNTLCSTLASCLDRLCPLASRPARASPPAPWLSDALREHRSKLRAAERIWRKTKNPAHLLTYQTLLSSFSAEVTSAKQTYYRLKINNATNPRLLFKTFSSLLYPPPPPASSTLTTDDFATFFCTKTAKISAQFAAPTTNTQDTTPTPHTLTSFSQLSESEVSKLVLSSHATTCPLDPIPSHLLQAISPAVIPTLTHIINTSLDSGLFPTTFKQARVTPLLKKPNLDHTLLENYRPVSLLPFMAKILEKVVFNQVLDFLTQNNLMDNKQSGFKKGHSTETALLSVVEDLRLAKADSKSSVLILLDLSAAFDTVNHQILLSTLESLGVAGTVIQWFRSYLSDRSFRVSWRGEVSNLQHLNTGVPQGSVLGPLLFSIYTSSLGPVIQRHGFSYHCYADDTQLYLSFHPDDPSVPARISACLLDISAWMKDHHLQLNLAKTEMLVVSANPTLHHNFSIQMDGATITASKMVKSLGVTIDDQLNFSDHISRTARSCRFALYNIRKIRPFLSEHAAQLLVQALVLSKLDYCNSLLALLPANSIKPLQLLQNAAARVVFNEPKRAHVTPLLVRLHWLPVAARIKFKTLMFAYKVTSGLAPSYLHSLLQIYVPSRNLRSVNERRLVVPSQRGKKSLSRTLTLNLPSWWNELPNCIRTAESLAIFKKRLKTQLFSLHFTS

SEQ ID NO: 366 - protein, 965 aa, synthetic construct
MCFLIPVVTNTRKTREVRCKRNPHNLRSIHVSTISQLSLSVGLWNCQSAVNKADFITSIATYSDYNLMALTETWLRPEDTATHATLSANFSFSHTPRQTGRGGGTGLLISKEWKFTLIPSLPTISSFEFHAVTIIHPFYINVVVIYRPPGKLGHFLDELDVLLSSFSNFDTPLLVLGDFNIYVDKPQAADFQTLLASFDLKRAPTSATHKSGNQLDLIYTRHCFTDQTIVTPLQISDHFLLSLNIHITPEPPHTPTLVTFRRNLRSLSPNRLSTIVSDSLPPSRKLTALDSNSATNTLCSTLASCLDRLCPLASRPARASPPAPWLSDALREHRSKLRAAERIWRKTKNPAHLLTYQTLLSSFSAEVTSAKQTYYRLKINNATNPRLLFKTFSSLLYPPPPPASSTLTTDDFATFFCTKTAKISAQFAAPTTNTQDTTPTPHTLTSFSQLSESEVSKLVLSSHATTCPLDPIPSHLLQAISPAVIPTLTHIINTSLDSGLFPTTFKQARVTPLLKKPNLDHTLLENYRPVSLLPFMAKILEKVVFNQVLDFLTQNNLMDNKQSGFKKGHSTETALLSVVEDLRLAKADSKSSVLILLDLSAAFDTVNHQILLSTLESLGVAGTVIQWFRSYLSDRSFRVSWRGEVSNLQHLNTGVPQGSVLGPLLFSIYTSSLGPVIQRHGFSYHCYADDTQLYLSFHPDDPSVPARISACLLDISKWMKDHHLQLNLAKTEMLVVSANPTLHHNFSIQMDGATITASKMVKSLGVTIDDQLNFSDHISRTARSCRFALYNIRKIRPFLSEHAAQLLVQALVLSKLDYCNSLLALLPANSIKPLQLLQNAAARVVFNEPKRAHVTPLLVRLHWLPVAARIKFKTLMFAYKVTSGLAPSYLHSLLQIYVPSRNLRSVNERRLVVPSQRGKKSLSRTLTLNLPSWWNELPNCIRTAESLAIFKKRLKTQLFSLHFTS

SEQ ID NO: 367 - protein, 965 aa, synthetic construct
MCFLIPVVTNTRKTREVRCKRNPHNLRSIHVSTISQLSLSVGLWNCQSAVNKADFITSIATYSDYNLMALTETWLRPEDTATHATLSANFSFSHTPRQTGRGGGTGLLISKEWKFTLIPSLPTISSFEFHAVTIIHPFYINVVVIYRPPGKLGHFLDELDVLLSSFSNFDTPLLVLGDFNIYVDKPQAADFQTLLASFDLKRAPTSATHKSGNQLDLIYTRHCFTDQTIVTPLQISDHFLLSLNIHITPEPPHTPTLVTFRRNLRSLSPNRLSTIVSDSLPPSRKLTALDSNSATNTLCSTLASCLDRLCPLASRPARASPPAPWLSDALREHRSKLRAAERIWRKTKNPAHLLTYQTLLSSFSAEVTSAKQTYYRLKINNATNPRLLFKTFSSLLYPPPPPASSTLTTDDFATFFCTKTAKISAQFAAPTTNTQDTTPTPHTLTSFSQLSESEVSKLVLSSHATTCPLDPIPSHLLQAISPAVIPTLTHIINTSLSSGLFPTTFKQARVTPLLKKPNLDHTLLENYRPVSLLPFMAKILEKVVFNQVLDFLTQNNLMDNKQSGFKKGHSTETALLSVVEDLRLAKADSKSSVLILLDLSAAFDTVNHQILLSTLESLGVAGTVIQWFRSYLSDRSFRVSWRGEVSNLQHLNTGVPQGSVLGPLLFSIYTSSLGPVIQRHGFSYHCYADDTQLYLSFHPDDPSVPARISACLLDISHWMKDHHLQLNLAKTEMLVVSANPTLHHNFSIQMDGATITASKMVKSLGVTIDDQLNFSDHISRTARSCRFALYNIRKIRPFLSEHAAQLLVQALVLSKLDYCNSLLALLPANSIKPLQLLQNAAARVVFNEPKRAHVTPLLVRLHWLPVAARIKFKTLMFAYKVTSGLAPSYLHSLLQIYVPSRNLRSVNERRLVVPSQRGKKSLSRTLTLNLPSWWNELPNCIRTAESLAIFKKRLKTQLFSLHFTS

SEQ ID NO: 368 - protein, 965 aa, synthetic construct
MCFLIPVVTNTRKTREVRCKRNPHNLRSIHVSTISQLSLSVGLWNCQSAVNKADFITSIATYSDYNLMALTETWLRPEDTATHATLSANFSFSHTPRQTGRGGGTGLLISKEWKFTLIPSLPTISSFEFHAVTIIHPFYINVVVIYRPPGKLGHFLDELDVLLSSFSNFDTPLLVLGDFNIYVDKPQAADFQTLLASFDLKRAPTSATHKSGNQLDLIYTRHCFTDQTIVTPLQISDHFLLSLNIHITPEPPHTPTLVTFRRNLRSLSPNRLSTIVSDSLPPSRKLTALDSNSATNTLCSTLASCLDRLCPLASRPARASPPAPWLSDALREHRSKLRAAERIWRKTKNPAHLLTYQTLLSSFSAEVTSAKQTYYRLKINNATNPRLLFKTFSSLLYPPPPPASSTLTTDDFATFFCTKTAKISAQFAAPTTNTQDTTPTPHTLTSFSQLSESEVSKLVLSSHATTCPLDPIPSHLLQAISPAVIPTLTHIINTSLDSGLFPTTFKQARVTPLLKKPNLDHTLLENYRPVSLLPFMAKILEKVVFNQVLDFLTQNNLMDNKQSGFKKGHSTETALLSVVEDLRLAKADSKSSVLILLDLSAAFDTVNHQILLSTLESLGVAGTVHQWFRSYLSDRSFRVSWRGEVSNLQHLNTGVPQGSVLGPLLFSIYTSSLGPVIQRHGFSYHCYADDTQLYLSFHPDDPSVPARISACLLDISHWMKDHHLQLNLAKTEMLVVSANPTLHHNFSIQMDGATITASKMVKSLGVTIDDQLNFSDHISRTARSCRFALYNIRKIRPFLSEHAAQLLVQALVLSKLDYCNSLLALLPANSIKPLQLLQNAAARVVFNEPKRAHVTPLLVRLHWLPVAARIKFKTLMFAYKVTSGLAPSYLHSLLQIYVPSRNLRSVNERRLVVPSQRGKKSLSRTLTLNLPSWWNELPNCIRTAESLAIFKKRLKTQLFSLHFTS

SEQ ID NO: 369-371 - skipped (3 entries)

SEQ ID NO: 372 - DNA, 34 bp, synthetic construct
  source 1..34: mol_type = other DNA
gaaatgtatttgctgtaccaatgcttttgacacg

SEQ ID NO: 373 - DNA, 11 bp, synthetic construct
  source 1..11: mol_type = other DNA
aaataaataaa

SEQ ID NO: 374 - DNA, 41 bp, synthetic construct
  source 1..41: mol_type = other DNA
tcatttgtaagtcgctttggataaaagcgtctgctaaatga

SEQ ID NO: 375 - DNA, 23 bp, synthetic construct
  source 1..23: mol_type = other DNA
ctaaatgtaaatgtaaatgtaaa

SEQ ID NO: 376 - protein, 982 aa, synthetic construct
MDEYQRSLSRPLLTIISINIEGLSLAKEELLAKMSEDISCDILCIQETHRDITMRRPKILGMQLAVERPHRQYGSAIFVRSGVAISATSLTEVNNIEILSVELDSCTVSSLYKPPGADFYFTPPTSCHNHEAHFVVGDFNSHSCVWGYDEDDRNGEAVLTWADNSRMSLLHDSKLPPSFNSGRWKRGYNPDLIFVKESISHQCTKRVLNPIPNTQHRPICCVAYAAVRPKSVPFRRRYNFNKANWTKFTETLEAAISDIEPSIENYDLFVEAVKRSSRLSIPRGCRTSYLPGLNEESLNQLQEYLRLFQENPYSDGTIAAGQKLSTALANAKKDRWIELLENLDMSKSSRKAWQLLRRLDSDPLVNPGHANVTPDQIAHQLIQNGKTNCSRIKMKINRVPELETHQLSSPLNLKELREAIKRCKTGKAPGLDDLMMEQIKHLGPKAENWLLKFYNQCLAHKQIPRAWRKTKIIAILKPGKDASNARNYRPISLLCHLYKVYERMLLNRLGPVIEPKLIAQQAGFRPGKNCTGQILHLTEHIEEGYEKGCITGTVFVDLTAAYDTVQHRKMLHKVYHITRDFDFTKTVQTLLENRSFYVEFQGQKSRWRRQKNGLPQGSVLAPTLFNIFTNDQPQPPLTKSFIYADDLGLTTQAKDFETVEKQLTNALKDLSSYYKENHLKPNPAKTQVCAFHLRNREANRKLKVTWEGQELEHCFHPKYLGVTLDRTLTYRKHCMNTKHKVAARNNILRKLTGSAWGADPQVIRTSALALSFSTAEYACPVWHKSAHAKQVDIALNETCRIITGCLKPTPVDKLYKLAGIAPPDVRREVAANGERKKVEHCESHPLHGYHPPPTRLKSRKGFMRTTTPLDVPPAAARVSLWAAKPGNSNWMAPQEGLPPGANQEWATWKSLNRLRSGVGRSKDNLARWHYLEESSTLCDCGAEQTTQHMYACPQCPASCTEEELFKATDNAVAVARFWSKTI

SEQ ID NO: 377 - protein, 77 aa, Saccharolobus solfataricus
ATVKFKYKGEEKEVDISKIKKVWRVGKMISFTYDEGGGKTGRGAVSEKDAPKELLQMLEKQKKGGSGKRTADGSEFE

SEQ ID NO: 378 - protein, 192 aa, Human immunodeficiency virus 1
MENRWQVMIVWQVDRMRIRTWKSLVKHHMYVSGKARGWFYRHHYESPHPRISSEVHIPLGDARLVITTYWGLHTGERDWHLGQGVSIEWRKKRYSTQVDPELADQLIHLYYFDCFSDSAIRKALLGHIVSPRCEYQAGHNKVGSLQYLALAALITPKKIKPPLPSVTKLTEDRWNKPQKTKGHRGSHTMNGH

SEQ ID NO: 379 - protein, 7 aa, synthetic construct
VKHHMYV

SEQ ID NO: 380 - protein, 9 aa, synthetic construct
QLIHLYYFD

SEQ ID NO: 381 - protein, 248 aa, Pseudomonas aeruginosa
MGTALTPLLTKFATRYEMGTTPEEVANTLKQTCFKGQVNDSQMVALLIVADQYKLNPFTKELYAFPDKNNGIVPVVGVDGWARIINENPQFDGMEFSMDQQGTECTCKIYRKDRSHAISATEYMAECKRNTQPWQSHPRRMLRHKAMIQCARLAFGFAGIYDQDEAERIVERDVTPAEQYEDVSEAICLIKDSPTMEDLQAAFSNAWKAYKTKGARDQLTAAKDQRKKELLDAPIDVEFEETGDDRAA

SEQ ID NO: 382 - protein, 87 aa, synthetic construct
AASLNGAPLIKDPMLIFVKTLTGKTITLEVEPSDTIENVKAKIQDKEGIPPDQQRLAFAGKSLEDGRTLSDYNILKDSKLHPLLRLR

SEQ ID NO: 383 - protein, 7 aa, synthetic construct
PSQQKRK

SEQ ID NO: 384 - protein, 6 aa, synthetic construct
KKKSKK

SEQ ID NO: 385 - protein, 465 aa, Homo sapiens
ADQLYLENIDEFVTDQNKIVTYKWLSYTLGVHVNQAKQMLYDYVERKRKENSGAQLHVTYLVSGSLIQNGHSCHKVAVVREDKLEAVKSKLAVTASIHVYSIQKAMLKDSGPLFNTDYDILKSNLQNCSKFSAIQCAAAVPRAPAESSSSSKKFEQSHLHMSSETQANNELTTNGHGPPASKQVSQQPKGIMGMFASKAAAKTQETNKETKTEAKEVTNASAAGNKAPGKGNMMSNFFGKAAMNKFKVNLDSEQAVKEEKIVEQPTVSVTEPKLATPAGLKKSSKKAEPVKVLQKEKKRGKRVALSDDETKETENMRKKRRRIKLPESDSSEDEVFPDSPGAYEAESPSPPPPPSPPLEPVPKTEPEPPSVKSSSGENKRKRKRVLKSKTYLDGEGCIVTEKVYESESCTDSEEELNMKTSSVHRPPAMTVKKEPREERKGPKKGTAALGKANRQVSITGFFQRK

SEQ ID NO: 386 - protein, 250 aa, synthetic construct
LVEPEEVVEMSHMPGDLFNLYLHQNYIDFFMEIDDIVRASEFLSFADILSGDWNTRSLLREYSTSIATRGVMHSNKARGYAHCQGGGSSFRPLHKPQWFLINKKYRENCLAAKALFPDFCLPALCLQTQLLPYLALLTIPMRNQAQISFIQDIGRLPLKRHFGRLKMEALTDREHGMIDPDSGDEAQLNGGHSAEESLGEPTQATVPETWSLPLSQNSASELPASQPQPFSAQGDMEENIIIEDYESDGT

SEQ ID NO: 387 - protein, 68 aa, synthetic construct
WSVEAVVLFLKQTDPLALCPLVDLFRSHEIDGKALLLLTSDVLLKHLGVKLGTAVKLCYYIDRLKQGK

SEQ ID NO: 388 - protein, 219 aa, synthetic construct
EDTQAIDWDVEEEEETEQSSESLRCNVEPVGRLHIFSGAHGPEKDFPLHLGKNVVGRMPDCSVALPFPSISKQHAEIEILAWDKAPILRDCGSLNGTQILRPPKVLSPGVSHRLRDQELILFADLLCQYHRLDVSLPFVSRGPLTVEETPRVQGETQPQRLLLAEDSEEEVDFLSERRMVKKSRTTSSSVIVPESDEEGHSPVLGGLGPPFAFNLNSDT

SEQ ID NO: 389 - protein, 64 aa, synthetic construct
MVRRFLVTLRIRRACGPPRVRVFVVHIPRLTGEWAAPGAPAAVALVLMLLRSQRLGQQPLPRRP

SEQ ID NO: 390 - protein, 7 aa, synthetic construct
RQRKRHK

SEQ ID NO: 391 - protein, 49 aa, synthetic construct
MLEELECGAPGARGAATAMDCKDRPAFPVKKLIQARLPFKRLNLVPKGK

SEQ ID NO: 392 - protein, 83 aa, synthetic construct
MLRPEISSTSPSAPAVSPSSGETRSPQGPRYNFGLQETPQSRPSVQVVSASTCPGTSGAAGDRSSSSSSLPCPAPNSRPAQGS

SEQ ID NO: 393 - DNA, 589 bp, synthetic construct
  source 1..589: mol_type = other DNA
aatcaacctctggattacaaaatttgtgaaagattgactggtattcttaactatgttgctccttttacgctatgtggatacgctgctttaatgcctttgtatcatgctattgcttcccgtatggctttcattttctcctccttgtataaatcctggttgctgtctctttatgaggagttgtggcccgttgtcaggcaacgtggcgtggtgtgcactgtgtttgctgacgcaacccccactggttggggcattgccaccacctgtcagctcctttccgggactttcgctttccccctccctattgccacggcggaactcatcgccgcctgccttgcccgctgctggacaggggctcggctgttgggcactgacaattccgtggtgttgtcggggaagctgacgtcctttccatggctgctcgcctgtgttgccacctggattctgcgcgggacgtccttctgctacgtcccttcggccctcaatccagcggaccttccttcccgcggcctgctgccggctctgcggcctcttccgcctcttcgccttcgccctcagacgagtcggatctccctttgggccgcctccccgc

SEQ ID NO: 394 - protein, 16 aa, synthetic construct
STQGRLDDFFKVTGSL

SEQ ID NO: 395 - protein, 25 aa, synthetic construct
RKRRQTSMTDFYHSKRRLIFSKRKP

SEQ ID NO: 396 - protein, 30 aa, synthetic construct
EKRTPLHAAAYLGDAEIIELLILSGARVNA

SEQ ID NO: 397 - DNA, 5933 bp, synthetic construct
  source 1..5933: mol_type = other DNA
tcgcgcgtttcggtgatgacggtgaaaacctctgacacatgcagctcccggagacggtcacagcttgtctgtaagcggatgccgggagcagacaagcccgtcagggcgcgtcagcgggtgttggcgggtgtcggggctggcttaactatgcggcatcagagcagattgtactgagagtgcaccatatgcggtgtgaaataccgcacagatgcgtaaggagaaaataccgcatcaggcgccattcgccattcaggctgcgcaactgttgggaagggcgatcggtgcgggcctcttcgctattacgccagctggcgaaagggggatgtgctgcaaggcgattaagttgggtaacgccagggttttcccagtcacgacgttgtaaaacgacggccagtgaattggagatcggtacttcgcgagtttaaactaatacgactcactataagggggggacacggaaagagcctccccgaagattgagtgaattcagtcgggcgtcccctgggcaacgtttcttgtaagcggccgatctttccaccccaaaagcattggatgaatggacgagtaccagagatctctgagcagacctctgctgaccatcatgagcatcaacatcgagggcctgagcctggccaaggaggagctgttagctaagatgagcgaggacatcagctgcgacatcctgtgcatccaggagacccacagagacatcaccatgagaagacccaagatcctgggcatgcagctggccgtggagagacctcatagacagtacggcagcgccatcttcgtgagaagcggcgtggctatcagcgctaccagcctgacagaggtgaacaatatagagatcctgagcgtggagctggacagctgcaccgtgagcagcttatacaagccccctggcgctgacttctacttcaccccccctacatcttgccacaaccacgaggcccacttcgtggtgggcgacttcaacagccactcttgcgtttggggctacgacgaggacgacagaaacggcgaggctgtgcttacctgggctgacaacagcagaatgagcctgctgcacgacagcaagctgcctcccagcttcaactccggcagatggaagagaggctacaaccccgacctgatcttcgtcaaggagagcatcagccaccagtgcaccaagagagtgctgaaccccatccccaacacccagcacagacccatctgttgcgtggcctacgccgctgtgagacctaagagcgtgcctttcagaagaagattcaacttcaataaggccaactggaccaagttcaccgagaccctggaggctgctatctccgacatcgagcctagcatcgagaactacgacctgttcgtggaggccgtgaagagaagcagcagactgagcatccccagaggctgcagaaccagctacctgcccggcttaaacgaggagagcctgaaccagttgcaggagtacctgagactgttccaggaaaacccctacagcgacggcaccatcgctgctggacaaaagctgagcaccgctctggccaacgccaagaaggacagatggatcgagctgctcgagaacctggacatgagcaagagcagcaggaaggcctggcagctgctgagaaggcttgacagcgaccctctggtgaaccctggccacgctaacgtgacacctgaccagatcgcccaccagctgatccagaacggcaagaccaactgcagccggatcaagatgaagatcaacagagtgcccgagctggagacacaccagctcagctctcctctgaacctgaaggagctgagagaggccatcaagagatgcaagaccggcaaggcccccggccttgacgaccttatgatggagcaaatcaagcacctgggccccaaggccgagaactggctgcttaagttctacaaccagtgcctggcccacaagcagatccccagggcctggagaaagaccaagatcatcgccatcctgaagcctggaaaggacgccagcaacgccagaaactacagacctatcagcctgctctgccacctgtacaaggtgtacgagagaatgctgctgaacagactgggccctgtgatcgagcccaagttaattgcccagcaggccggcttcagacccggcaagaattgcacaggccagatcctgcacctgacggagcacattgaggaggggtacgagaagggctgcatcaccggcacagtgttcgtcgacctgaccgctgcttacgacaccgtgcagcacaggaagatgctgcacaaggtctaccacatcacaagagacttcgacttcaccaagaccgtccagaccctgctggagaacagaagcttctacgtggagttccagggccagaagagcagatggcggagacagaagaacggcctgccccagggatctgtgctggctcctacacttttcaacatcttcacaaacgaccagccccagccccccctgaccaagagcttcatctatgctgacgatctgggcctgaccacccaagcgaaggacttcgagacagtggagaagcaactgaccaacgccctcaaggacctgagtagttactacaaggagaaccacctcaagcccaaccccgccaagacccaggtttgtgctttccacctgagaaacagagaggcaaacagaaagctgaaggtgacctgggagggccaggagttagagcactgcttccaccctaagtacctgggggtgaccctcgacagaaccctgacctatcggaagcactgcatgaacaccaagcataaggtggccgcacggaacaacatcctgaggaagctgacaggctccgcctggggtgctgatcctcaggttatcagaacctccgccctggccctgagcttcagcaccgccgaatatgcttgccctgtgtggcacaagagcgcccacgccaagcaggttgatatcgccctgaacgagacctgcagaatcatcacaggctgtcttaagcccacccccgtggacaagctctacaagctggctggcatcgctcctcccgacgtgaggagagaagtggctgctaacggggagagaaagaaggtggagcactgtgagagccaccccctgcatggctaccatcctcctcctaccagactgaagagccggaagggcttcatgagaacaaccacccccctggacgtgcctcctgctgctgccagagtgtctctttgggctgccaagcccggcaacagcaactggatggctcctcaagagggccttcctcctggcgccaatcaggagtgggctacctggaagtccctgaacaggctgagatccggcgtgggcagaagcaaggacaacctggccagatggcactacctcgaggagtccagcaccctgtgcgactgtggtgctgagcaaaccacacagcacatgtacgcctgccctcagtgccctgcctcttgcacagaggaagaactgttcaaggccaccgacaacgccgtggctgtggccaggttctggagcaagacaatctgagtcgacgctagcaccggtaaaaaaaaaaaaaaaaaaaaaaaaaaaaaaaacgttgactaaaaaaaaaaaaaaaaaaaaaaaaaaaaaaaaaaaaaaaaaaaaaaaaaaaaaaaaaaaaaaaaaaaaaaaaaaaagtcttcgcgcgcatcatcggatgccgggaccgacgagtgcagaggcgtgcaagcgagcttggcgtaatcatggtcatagctgtttcctgtgtgaaattgttatccgctcacaattccacacaacatacgagccggaagcataaagtgtaaagcctggggtgcctaatgagtgagctaactcacattaattgcgttgcgctcactgcccgctttccagtcgggaaacctgtcgtgccagctgcattaatgaatcggccaacgcgcggggagaggcggtttgcgtattgggcgctcttccgcttcctcgctcactgactcgctgcgctcggtcgttcggctgcggcgagcggtatcagctcactcaaaggcggtaatacggttatccacagaatcaggggataacgcaggaaagaacatgtgagcaaaaggccagcaaaaggccaggaaccgtaaaaaggccgcgttgctggcgtttttccataggctccgcccccctgacgagcatcacaaaaatcgacgctcaagtcagaggtggcgaaacccgacaggactataaagataccaggcgtttccccctggaagctccctcgtgcgctctcctgttccgaccctgccgcttaccggatacctgtccgcctttctcccttcgggaagcgtggcgctttctcatagctcacgctgtaggtatctcagttcggtgtaggtcgttcgctccaagctgggctgtgtgcacgaaccccccgttcagcccgaccgctgcgccttatccggtaactatcgtcttgagtccaacccggtaagacacgacttatcgccactggcagcagccactggtaacaggattagcagagcgaggtatgtaggcggtgctacagagttcttgaagtggtggcctaactacggctacactagaagaacagtatttggtatctgcgctctgctgaagccagttaccttcggaaaaagagttggtagctcttgatccggcaaacaaaccaccgctggtagcggtggtttttttgtttgcaagcagcagattacgcgcagaaaaaaaggatctcaagaagatcctttgatcttttctacggggtctgacgctcagtggaacgaaaactcacgttaagggattttggtcatgagattatcaaaaaggatcttcacctagatccttttaaattaaaaatgaagttttaaatcaatctaaagtatatatgagtaaacttggtctgacagttaccaatgcttaatcagtgaggcacctatctcagcgatctgtctatttcgttcatccatagttgcctgactccccgtcgtgtagataactacgatacgggagggcttaccatctggccccagtgctgcaatgataccgcgggacccacgctcaccggctccagatttatcagcaataaaccagccagccggaagggccgagcgcagaagtggtcctgcaactttatccgcctccatccagtctattaattgttgccgggaagctagagtaagtagttcgccagttaatagtttgcgcaacgttgttgccattgctacaggcatcgtggtgtcacgctcgtcgtttggtatggcttcattcagctccggttcccaacgatcaaggcgagttacatgatcccccatgttgtgcaaaaaagcggttagctccttcggtcctccgatcgttgtcagaagtaagttggccgcagtgttatcactcatggttatggcagcactgcataattctcttactgtcatgccatccgtaagatgcttttctgtgactggtgagtactcaaccaagtcattctgagaatagtgtatgcggcgaccgagttgctcttgcccggcgtcaatacgggataataccgcgccacatagcagaactttaaaagtgctcatcattggaaaacgttcttcggggcgaaaactctcaaggatcttaccgctgttgagatccagttcgatgtaacccactcgtgcacccaactgatcttcagcatcttttactttcaccagcgtttctgggtgagcaaaaacaggaaggcaaaatgccgcaaaaaagggaataagggcgacacggaaatgttgaatactcatactcttcctttttcaatattattgaagcatttatcagggttattgtctcatgagcggatacatatttgaatgtatttagaaaaataaacaaataggggttccgcgcacatttccccgaaaagtgccacctgacgtctaagaaaccattattatcatgacattaacctataaaaataggcgtatcacgaggccctttcgtc

SEQ ID NO: 398 - DNA, 5967 bp, synthetic construct
  source 1..5967: mol_type = other DNA
tcgcgcgtttcggtgatgacggtgaaaacctctgacacatgcagctcccggagacggtcacagcttgtctgtaagcggatgccgggagcagacaagcccgtcagggcgcgtcagcgggtgttggcgggtgtcggggctggcttaactatgcggcatcagagcagattgtactgagagtgcaccatatgcggtgtgaaataccgcacagatgcgtaaggagaaaataccgcatcaggcgccattcgccattcaggctgcgcaactgttgggaagggcgatcggtgcgggcctcttcgctattacgccagctggcgaaagggggatgtgctgcaaggcgattaagttgggtaacgccagggttttcccagtcacgacgttgtaaaacgacggccagtgaattggagatcggtacttcgcgagtttaaactaatacgactcactataagggggggacacggaaagagcctccccgaagattgagtgaattcagtcgggcgtcccctgggcaacgtttcttgtaagcggccgatctttccaccccaaaagcattggatgagtcgacgcggcctactcgacggatcgatccgaacaaacgacccaacacccgtgcgttttattctgtctttttattgccgatcccctcagaagaactcgtcaagaaggcgatagaaggcgatgcgctgcgaatcgggagcggcgataccgtaaagcacgaggaagcggtcagcccattcgccgccaagctcttcagcaatatcacgggtagccaacgctatgtcctgatagcggtcggccgctttagcgagggggcagggcctgcatgtgaagggcgtcgtaggtgtccttggtggctgtactcagaccctggtaaaggccatcgtgccccttgcccctccggcgctcgcctttcatcccaatctcactgtaggcctccgccatcttatctttctgcagttcattgtacaggccttcctgagggttcttccttctcggctttccccccatctcagggtcccggccacgtctcttgtccaaaacatcgtactcctctcttcgtcctagattgagctcgttatagagctggttctggccctgcttgtacgcgggggcgtctgcgctcctgctgaacttcactctcagttcacatcctccttcttcttcttctggaaatcggcagctacagccatcttcctcttgagtagtttgtactggcctcataaatggttgtttgaatatatacaggagtttctttctgccccgtttgcagtaaagggtgataaccagtgacaggagaaggaccccacaagtcccggccaagggcgcccagatgtagatatcacaggcgaagtccagccccctcgtgtgcactgcgccccccgccgctggccggcacgcctctgggcgcagggacaggggctgcgacgcgatggtgggcgccggtgttggtggtcgcggcgctggcgtcgtggttgaggagacggtgactgaggttccttggccccagtagtccatagcatagctaccaccgtagtaataatgtttggcacagtagtaaatggctgtgtcatcagtttgcagactgttcatttttaagaaaacttggctcttggagttgtccttgatgatggtcagtctggatttgagagctgaattatagtatgtggtttcactaccccatattactcccagccactccagaccctttcgtggaggctggcgaatccagcttacaccatagtcgggtaatgagacgcctgagacagtgcatgtgacggacaggctctgtgagggcgccaccaggccaggtcctgactcctgcagtttcacctcagatccgccgccacccgacccaccaccgcccgagccaccgccacctgtgatctccagcttggtcccccctccgaacgtgtacggaagcgtattaccctgttggcaaaagtaagtggcaatatcttcttgctccaggttgctaatggtgagagaataatctgttccagacccactgccactgaaccttgatgggactcctgagtgtaatcttgatgtatggtagatcaggagtttaacagttccatctggtttctgctgataccaatttaaatatttactaatgtcctgacttgccctgcaactgatggtgactctgtctcccagagaggcagacagggaggatgtagtctgtgtcatctggatgtccggcctggcggcgtggagcagcaaggccagcggcaggagcaaggcggtcactggtaaggccatggtggctcacgacacctgaaatggaagaaaaaaactttgaaccactgtctgaggcttgagaatgaaccaagatccaaactcaaaaagggcaaattccaaggagaattacatcaagtgccaagctggcctaacttcagtctccacccactcagtgtggggaaactccatcgcataaaacccctccccccaacctaaagacgacgtactccaaaagctcgagaactaatcgaggtgcctggacggcgcccggtactccgtggagtcacatgaagcgacggctgaggacggaaaggcccttttcctttgtgtgggtgactcacccgcccgctctcccgagcgccgcgtcctccattttgagctccctgcagcagggccgggaagcggccatctttccgctcacgcaactggtgccgaccgggccagccttgccgcccagggcggggcgatacacggcggcgcgaggccaggcaccagagcaggccggccagcttgagactacccccgtccgattctcggtggccgcgctcgcaggccccgcctcgccgaacatgtgcgctgggacgcacgggccccgtcgccgcccgcggccccaaaaaccgaaataccagtgtgcagatcttggcccgcatttacaagactatcttgccagaaaaaaagcgtcgcagcaggtcatcaaaaattttaaatggctagagacttatcgaaagcagcgagacaggcgcgaaggtgccaccagattcgcacgcggcggccccagcgcccaggccaggcctcaactcaagcacgaggcgaaggggctccttaagcgcaaggcctcgaactctcccacccacttccaacccgaagctcgggatcaagaatcacgtactgcagccaggtggaagtaattcaaggcacgcaagggccataacccgtaaagaggccaggcccgcgggaaccacacacggcacttacctgtgttctggcggcaaacccgttgcgaaaaagaacgttcacggcgactactgcacttatatacggttctcccccaccctcgggaaaaaggcggagccagtacacgacatcactttcccagtttaccccgcgccaccttctctaggcaccggttcaattgccgacccctccccccaacttctcggggactgtgggcgatgtgcgctctgcccactgacgggcaccggagccgaattcgaagcttttgcttgtgatttcttttcttttttattttatttccattatttgaaatgtatttgctgtaccaatgcttttgacacgaaataaataaagctagcaccggtaaaaaaaaaaaaaaaaaaaaaaaaaaaaaaaacgttgactaaaaaaaaaaaaaaaaaaaaaaaaaaaaaaaaaaaaaaaaaaaaaaaaaaaaaaaaaaaaaaaaaaaaaaaaaaaagtcttcgcgcgcatcatcggatgccgggaccgacgagtgcagaggcgtgcaagcgagcttggcgtaatcatggtcatagctgtttcctgtgtgaaattgttatccgctcacaattccacacaacatacgagccggaagcataaagtgtaaagcctggggtgcctaatgagtgagctaactcacattaattgcgttgcgctcactgcccgctttccagtcgggaaacctgtcgtgccagctgcattaatgaatcggccaacgcgcggggagaggcggtttgcgtattgggcgctcttccgcttcctcgctcactgactcgctgcgctcggtcgttcggctgcggcgagcggtatcagctcactcaaaggcggtaatacggttatccacagaatcaggggataacgcaggaaagaacatgtgagcaaaaggccagcaaaaggccaggaaccgtaaaaaggccgcgttgctggcgtttttccataggctccgcccccctgacgagcatcacaaaaatcgacgctcaagtcagaggtggcgaaacccgacaggactataaagataccaggcgtttccccctggaagctccctcgtgcgctctcctgttccgaccctgccgcttaccggatacctgtccgcctttctcccttcgggaagcgtggcgctttctcatagctcacgctgtaggtatctcagttcggtgtaggtcgttcgctccaagctgggctgtgtgcacgaaccccccgttcagcccgaccgctgcgccttatccggtaactatcgtcttgagtccaacccggtaagacacgacttatcgccactggcagcagccactggtaacaggattagcagagcgaggtatgtaggcggtgctacagagttcttgaagtggtggcctaactacggctacactagaagaacagtatttggtatctgcgctctgctgaagccagttaccttcggaaaaagagttggtagctcttgatccggcaaacaaaccaccgctggtagcggtggtttttttgtttgcaagcagcagattacgcgcagaaaaaaaggatctcaagaagatcctttgatcttttctacggggtctgacgctcagtggaacgaaaactcacgttaagggattttggtcatgagattatcaaaaaggatcttcacctagatccttttaaattaaaaatgaagttttaaatcaatctaaagtatatatgagtaaacttggtctgacagttaccaatgcttaatcagtgaggcacctatctcagcgatctgtctatttcgttcatccatagttgcctgactccccgtcgtgtagataactacgatacgggagggcttaccatctggccccagtgctgcaatgataccgcgggacccacgctcaccggctccagatttatcagcaataaaccagccagccggaagggccgagcgcagaagtggtcctgcaactttatccgcctccatccagtctattaattgttgccgggaagctagagtaagtagttcgccagttaatagtttgcgcaacgttgttgccattgctacaggcatcgtggtgtcacgctcgtcgtttggtatggcttcattcagctccggttcccaacgatcaaggcgagttacatgatcccccatgttgtgcaaaaaagcggttagctccttcggtcctccgatcgttgtcagaagtaagttggccgcagtgttatcactcatggttatggcagcactgcataattctcttactgtcatgccatccgtaagatgcttttctgtgactggtgagtactcaaccaagtcattctgagaatagtgtatgcggcgaccgagttgctcttgcccggcgtcaatacgggataataccgcgccacatagcagaactttaaaagtgctcatcattggaaaacgttcttcggggcgaaaactctcaaggatcttaccgctgttgagatccagttcgatgtaacccactcgtgcacccaactgatcttcagcatcttttactttcaccagcgtttctgggtgagcaaaaacaggaaggcaaaatgccgcaaaaaagggaataagggcgacacggaaatgttgaatactcatactcttcctttttcaatattattgaagcatttatcagggttattgtctcatgagcggatacatatttgaatgtatttagaaaaataaacaaataggggttccgcgcacatttccccgaaaagtgccacctgacgtctaagaaaccattattatcatgacattaacctataaaaataggcgtatcacgaggccctttcgtc

SEQ ID NO: 399 - skipped

SEQ ID NO: 400 - protein, 1368 aa, Streptococcus pyogenes [sequence omitted]

SEQ ID NO: 401 - protein, 773 aa, synthetic construct
GIHGVPAAVDLRTLGYSQQQQEKIKPKVRSTVAQHHEALVGHGFTHAHIVALSQHPAALGTVAVKYQDMIAALPEATHEAIVGVGKQWSGARALEALLTVAGELRGPPLQLDTGQLLKIAKRGGVTAVEAVHAWRNALTGAPLNLTPEQVVAIASHDGGKQALETVQRLLPVLCQAHGLTPEQVVAIASHDGGKQALETVQRLLPVLCQAHGLTPEQVVAIASHDGGKQALETVQRLLPVLCQAHGLTPEQVVAIASHDGGKQALETVQRLLPVLCQAHGLTPEQVVAIASNGGGKQALETVQRLLPVLCQAHGLTPEQVVAIASHDGGKQALETVQRLLPVLCQAHGLTPEQVVAIASHDGGKQALETVQRLLPVLCQAHGLTPEQVVAIASNIGGKQALETVQRLLPVLCQAHGLTPEQVVAIASHDGGKQALETVQRLLPVLCQAHGLTPEQVVAIASHDGGKQALETVQRLLPVLCQAHGLTPEQVVAIASHDGGKQALETVQRLLPVLCQAHGLTPEQVVAIASHDGGKQALETVQRLLPVLCQAHGLTPEQVVAIASNIGGKQALETVQRLLPVLCQAHGLTPEQVVAIASHDGGKQALETVQRLLPVLCQAHGLTPEQVVAIASNIGGKQALETVQRLLPVLCQAHGLTPEQVVAIASNNGGKQALETVQRLLPVLCQAHGLTPEQVVAIASNGGGRPALESIVAQLSRPDPALAALTNDHLVALACLGGRPALDAVKKGLPHAPALIKRTNRRIPERTSHRVAGS

SEQ ID NO: 402 - protein, 74 aa, synthetic construct
SVSMVHSERLPLLMNRNGIRFQSEVIDPNPPKKVKWVLTGSGGNMFTANVRGSNVSSLVKHTWSEAFVSLIEDR

1. A nucleic acid encoding an engineered protein comprising a retroelement-derived polypeptide and at least one heterologous polypeptide-;
wherein the retroelement-derived polypeptide is derived from a non-long terminal repeat (non-LTR) retrotransposon, wherein the non-LTR retrotransposon is an apurinic/apyrimidinic endonucleases (APE)-type retrotransposon selected from a ZFL2-2 retrotransposon, a Vingi-1_Acar retrotransposon, a Vingi-2_Acar retrotransposon, a L2-18_Acar retrotransposon, or a CR1-1_Acar retrotransposon;
wherein the at least one heterologous polypeptide comprises an RNA/DNA processing polypeptide or domain thereof, an RNA/DNA repair polypeptide or domain thereof, a nucleic acid binding polypeptide or domain thereof, or a nucleosome binding polypeptide or domain thereof, and
wherein the engineered protein exhibits at least one improved integration characteristic, as compared to a retroelement-derived polypeptide not fused to the at least one heterologous polypeptide.

2.-3. (canceled)

4. The nucleic acid of claim 1, wherein the at least one heterologous polypeptide comprises an RNA/DNA processing polypeptide or domain thereof.

5. (canceled)

6. The nucleic acid of claim 4, wherein the RNA/DNA processing polypeptide is a Rad51 polypeptide, an RNAseH domain, or a DNA polymerase.

7. (canceled)

8. The nucleic acid of claim 1, wherein the at least one heterologous polypeptide comprises an RNA/DNA repair polypeptide or domain thereof.

9. (canceled)

10. The nucleic acid of claim 8, wherein the RNA/DNA repair polypeptide is a CtIP-derived polypeptide, a RecT-derived polypeptide, an HSV-1 alkaline nuclease-derived polypeptide, a BRCA2-derived polypeptide, a DSS1-derived polypeptide, a nanog-derived polypeptide, an NBN-derived polypeptide, a RAD17-derived polypeptide, an ANKRD28-derived polypeptide, a PCNA interaction motif polypeptide, a MDC1-derived polypeptide, a MSH4-derived polypeptide, a SCML1-derived polypeptide, a CDKN2A-derived polypeptide, a 53BP1 inhibitor, or a p53 inhibitor.

11.-21. (canceled)

22. The nucleic acid of claim 1, wherein the at least one heterologous polypeptide comprises a nucleic acid binding polypeptide or domain thereof.

23. The nucleic acid of claim 22, wherein the nucleic acid binding polypeptide comprises a non-sequence specific DNA binding polypeptide or domain thereof.

24. The nucleic acid of claim 23, wherein the non-sequence specific DNA binding polypeptide comprises a Sto7d DNA binding domain having an amino acid sequence that is at least 70% identical to the sequence as set forth in SEQ ID NO: 26, or an Sso7d DNA binding domain having an amino acid sequence that is at least 70% identical to the sequence as set forth in SEQ ID NO: 377.

25.-26. (canceled)

27. The nucleic acid of claim 1, wherein at least one heterologous polypeptide comprises a nucleosome binding polypeptide or domain thereof.

28. The nucleic acid of claim 27, wherein the nucleosome binding polypeptide comprises;
(a) an HMGN1 polypeptide having an amino acid sequence that is at least 70% identical to the sequence as set forth in SEQ ID NO:23;
(b) an HMGB1 polypeptide having an amino acid sequence that is at least 70% identical to the sequence as set forth in SEQ ID NO:24; or
(c) an StkC DNA binding domain having an amino acid sequence that is at least 70% identical to the sequence as set forth in SEQ ID NO:402.

29.-30. (canceled)

31. The nucleic acid of claim 1, wherein the engineered protein comprises the at least one heterologous polypeptide fused to the N-terminus of the retroelement-derived polypeptide, to the C-terminus of the retroelement-derived polypeptide and/or internally within the retroelement-derived polypeptide.

32.-35. (canceled)

36. The nucleic acid of claim 1, wherein engineered protein comprises a plurality of heterologous polypeptides.

37.-54. (canceled)

55. The nucleic acid of claim 1, wherein the retroelement-derived polypeptide is a retroelement-derived polypeptide variant comprising an amino acid substitution, an amino acid deletion, an amino acid truncation, or a combination thereof, when compared to a wild type retroelement-derived polypeptide.

56. The nucleic acid of claim 1, wherein the retroelement-derived polypeptide comprises a reverse transcriptase domain, an endonuclease domain, an integrase domain, and/or an RNA binding domain.

57.-126. (canceled)

127. The nucleic acid of claim 1 comprising a codon optimized sequence, wherein the codon optimized sequence is optimized for expression in human cells.

128.-130. (canceled)

131. An engineered protein encoded by the nucleic acid of claim 1.

132. A composition comprising:
a) the first nucleic acid of claim 1; and
b) a second nucleic acid comprising a polynucleotide encoding a gene of interest.

133. The composition of claim 132, wherein the first and second nucleic acids are separate DNA molecules or separate RNA molecules, or wherein one of the first and second nucleic acids is a DNA molecule and one of the first and second nucleic acids is an RNA molecule.

134.-160. (canceled)

161. The composition of claim 132, wherein the first and second nucleic acids are comprised within a plurality of LNP particles.

162. A method of modifying a polynucleotide, comprising contacting a polynucleotide with the nucleic acid of claim 1.

163. (canceled)

164. A method of treating a subject in need thereof comprising administering to the subject the nucleic acid of claim 1.

165.-166. (canceled)
